(19) United States
(12) Patent Application Publication
(10) Pub. No.: US 2019/0194728 A1
(43) Pub. Date: Jun. 27, 2019

(54) Systemic inflammatory and pathogen biomarkers and uses therefor

(71) Applicant: ImmuneXpress Pty Ltd, Boonash, Queensland (AU)

(72) Inventors: Richard Bruce BRANDON, Boonah (AU); Dayle Lorand SAMPSON, Shoreline, WA (US); Leo Charles MCHUGH, Seattle, WA (US)

(21) Appl. No.: 16/327,687

(22) PCT Filed: Aug. 24, 2017
(86) PCT No.: PCT/AU2017/050894

§ 371 Date: Feb. 22, 2019

(30) Foreign Application Priority Data
Aug. 24, 2016 (AU) 2016903370

(51) Int. Cl. C12Q 1/689; C12Q 1/6883; C12Q 1/6893; C12Q 1/70

(52) U.S. Cl. CPC C12Q 1/689; C12Q 1/6883; C12Q 2600/158; C12Q 1/701; C12Q 1/6893

(57) ABSTRACT

Disclosed are compositions, methods and apparatus for diagnosing and/or monitoring an infection by a bacterium, virus or protozoan by measurement of pathogen-associated and non-infectious systemic inflammation and optionally in combination with detection of a pathogen specific molecule. The invention can be used for diagnosis, including early diagnosis, ruling-out, ruling-in, monitoring, making treatment decisions, or management of subjects suspected of, or having, systemic inflammation. More particularly, the present disclosure relates to host peripheral blood RNA and protein biomarkers, which are used in combination, and optionally with peripheral blood broad-range pathogen-specific detection assays, that are useful for distinguishing between bacterial, viral, protozoal and non-infectious causes of systemic inflammation.

### FIELD OF THE INVENTION

[0001] This application claims priority to Australian Provisional Application No. 2016903370 entitled “Systemic inflammatory and pathogen biomarkers and uses therefor” filed 24 Aug. 2016, the contents of which are incorporated herein by reference in their entirety.

[0002] This invention relates generally to compositions, methods and apparatus for diagnosing and/or monitoring an infection by a bacterium, virus or protozoan by measurement of pathogen-associated and non-infectious systemic inflammation and optionally in combination with detection of a pathogen specific molecule. The invention can be used for diagnosis, including early diagnosis, ruling-out, ruling-in, monitoring, making treatment decisions, or management of subjects suspected of, or having, systemic inflammation. More particularly, the present invention relates to host peripheral blood RNA and protein biomarkers, which are used in combination, and optionally with peripheral blood broad-range pathogen-specific detection assays, that are useful for distinguishing between bacterial, viral, protozoal and non-infectious causes of systemic inflammation.

### BACKGROUND OF THE INVENTION

[0003] Fever and clinical signs of systemic inflammation (or SIRS) are commonly seen in patients presenting to medical services; either in general practice clinics, outpatient clinics, emergency rooms, hospital wards or intensive care units (Rangel-Frausto et al. (1995). The natural history of the systemic inflammatory response syndrome (SIRS). A prospective study. JAMA: the Journal of the American Medical Association, 273(2), 117-123; McGowan et al. (1987). Fever in hospitalized patients. With special reference to the medical service. The American Journal of Medicine, 82(3 Spec No), 580-586; Bor et al. (1988). Fever in hospitalized medical patients: characteristics and significance. Journal of General Internal Medicine, 3(2), 119-125; Finkelstein et al. (2000). Fever in pediatric primary care: occurrence, management, and outcomes. Pediatrics, 105(1 Pt 3), 260-266).

[0004] When SIRS is the result of a confirmed infectious process it is called infection-positive SIRS (ipSIRS), otherwise known as sepsis. Within this definition lies the following assumptions; the infectious process could be local or generalized; the infection could be bacterial, viral or parasitic; the infectious process could be in an otherwise sterile body compartment. Such a definition has been updated in Levy et al. 2003 (“2001 SCCM/ESICM/ACCP/ATS/SIS International Sepsis Definitions Conference,” Critical Care Medicine 31, no. 4: 1250-1256) to accommodate clinical and research use of the definition. The revised definition allowed that the infection be in a sterile or non-sterile site (e.g., overgrowth of a pathogen/commensal in the intestine) and that the infection can be either confirmed or suspected. More recently, the definition of sepsis has been updated to be a “life-threatening organ dysfunction caused by a dysregulated host response to infection” (Singer, M., Deutschman, C. S., Seymour, C. W., Shankar-Hari, M., Annane, D., Bauer, M., et al. (2016). The Third International Consensus Definitions for Sepsis and Septic Shock (Sepsis-3). JAMA: the Journal of the American Medical Association, 315(8), 801-10).

[0005] In many instances the use of the terms SIRS and sepsis, their changing definitions, and what clinical conditions they do or do not include, are confusing in clinical situations. Such confusion leads to difficulties in clinical diagnosis and in making decisions on subsequent patient treatment and management. Difficulties in clinical diagnosis are based on the following questions: 1) what constitutes a “suspected” infection given that many body organs/sites are naturally colonized by microbes (e.g., Escherichia coli in the intestines, Staphylococcus epidermidis in skin), viruses (e.g., latent viruses such as herpes, resident human rhinovirus in otherwise healthy children) or parasites (e.g., Toxoplasma, Giardia); 2) what constitutes a pathological growth of an organism in a normally non-sterile body site?; 3) what contributions to SIRS are made by a bacterial/viral/parasitic co-infection in a non-sterile body site (e.g., upper respiratory tract), and if such an infection is suspected then should the patient be put on antibiotics, anti-viral or anti-parasitic compounds?

[0006] Patients with fever and other clinical signs of SIRS need to be carefully assessed, and tested, to determine the cause of the presenting clinical signs as there are many possible differential diagnoses (Munro, N. (2014). Fever in acute and critical care: a diagnostic approach. AACN Adv Crit Care 25: 237-248). Possible, non-limiting, differential diagnoses include infection (bacterial, viral, parasitic), trauma, allergy, drug reaction, autoimmunity, surgery, neutropenia, cancer, metabolic disorders, clotting disorders.

[0007] Patients with fever and SIRS caused by bacterial infection often require immediate medical attention and it is therefore important to quickly and accurately differentiate such patients.

[0008] Patients with fever and SIRS caused by viral infection need to be further assessed to determine 1) the degree of systemic inflammation due to viral infection, 2) the degree of involvement of microbes (commensals, microbiome, pathogens) to systemic inflammation 3) contributions that each of viruses, microbes and sterile injury are making to systemic inflammation 4) likelihood of the patient rapidly deteriorating.

[0009] Patients with fever and SIRS caused by a protozoal infection (e.g., malaria) also need to be further assessed to determine 1) the degree of systemic inflammation due to protozoal infection, 2) the degree of involvement of other microbes (commensals, microbiome, bacterial or viral pathogens) to systemic inflammation 3) contributions that each of protozoans, viruses, microbes and sterile injury are making to systemic inflammation 4) likelihood of the patient rapidly deteriorating.

[0010] The results of such an assessments aids clinicians in making appropriate management and treatment decisions. Appropriate patient management and treatment decisions leads to lower mortality, shorter hospital stays, less use of medical resources and better patient outcomes.

[0011] For the purposes of the present disclosure the following definitions are used: Bacterial associated SIRS (BaSIRS) is a condition of a patient with systemic inflammation due to bacterial infection; Viral associated SIRS (VaSIRS) is a condition of a patient with systemic inflammation due to a viral infection; Protozoal associated SIRS (PaSIRS) is a condition of a patient with systemic inflammation due to a protozoal infection; infection-negative SIRS (InSIRS) is a condition of a patient with systemic inflammation due to non-infectious causes. Patients with the conditions BaSIRS, VaSIRS, PaSIRS or InSIRS all have systemic inflammation or SIRS. BaSIRS, VaSIRS, PaSIRS and InSIRS biomarkers refer to specific host response biomarkers associated with the conditions of BaSIRS, VaSIRS, PaSIRS and InSIRS, respectively. Bacterial Infection Positive (BIP), Viral Infection Positive (VIP) and Protozoal Infection Positive (PIP) conditions are conditions of patients with detectable bacterial, viral or parasitic molecules respectively. Bacterial Infection Negative (BIN), Viral Infection Negative (VIN) and Protozoal Infection Negative (PIN) conditions are conditions of patients with non-detectable bacterial, viral or parasitic molecules respectively. BIP, VIP and PIP biomarkers refers to biomarkers that are specific to pathogen molecules as determined by the use of bacterial, viral or protozoal molecule detection assays. Collectively, BaSIRS, VaSIRS, PaSIRS and InSIRS biomarkers are referred to as “host response specific biomarkers.” BIP, VIP and PIP biomarkers are referred to as “pathogen specific biomarkers”. Patients that present with clinical signs of SIRS can be pathogen specific biomarker positive or negative. Thus, patients can be: BaSIRS/BIP, BaSIRS/BIN, VaSIRS/VIP, VaSIRS/VIN, PaSIRS/PIP, PaSIRS/PIN, InSIRS/BIP, InSIRS/BIN, InSIRS/VIP, InSIRS/VIN, InSIRS/PIP, InSIRS/PIN. Suitably, various biomarkers for each of the conditions can found in higher or lower amounts or be detected or not. The results of host response specific biomarker assays and pathogen specific biomarker assays can be combined creating a BaSIRS, VaSIRS, PaSIRS or InSIRS “indicator”.

[0012] Whether or not a host responds to a pathogen infection or insult through a SIRS depends largely upon the extent and type of exposure to antigen(s) (PAMPs) or damage associated molecular patterns (DAMPs) (Klimpel G R. Immune Defenses. In: Baron S, editor. Medical Microbiology. 4th edition. Galveston (Tex.): University of Texas Medical Branch at Galveston; 1996. Chapter 50). Factors that affect host immune system exposure to PAMPs and DAMPs include; 1) Host immune status, including vaccination, 2). Primary or secondary exposure to the same antigen(s) or antigen class or DAMPs, 3). Stage of infection or insult (early, late, re-activation, recurrence), 4). Infection type (intracellular, cytolytic, persistent, latent, integrated), 5). Mechanism of infection spread within the host (primary hematogenous, secondary hematogenous, local, nervous), 6). Pathogen or insult location (systemic or restricted to mucosal surface or a tissue/organ).

[0013] There are a limited number of microorganisms (bacteria, yeast, viruses, protozoans) that cause disease in humans and an even fewer number cause the majority of infectious diseases. TABLE 1 lists common bacterial, viral and protozoal pathogens associated with human BaSIRS, VaSIRS and PaSIRS, respectively. Such pathogens have multiple methods of interacting with the host and its cells and if a host mounts a systemic inflammatory response to an infection it means that the immune system has been exposed to sufficient levels of novel pathogen molecules. Representative types of pathogen molecules that can elicit a systemic inflammatory response include proteins, nucleic acids (RNA and/or DNA), lipoproteins, lipoteichoic acid and lipopolysaccharides, many of which can be detected (and typed) circulating in blood at some stage during the disease pathogenesis.

[0014] Many pathogen molecules are specific to a particular type of pathogen and the host immune system will respond in a specific, adaptive, and usually delayed, manner. However, it is known that there are host receptors, called pattern recognition receptors (PRR), for foreign (microbial, viral, protozoal) antigens (Perry, A. K., Chen, G., Zheng, D., Tang, H., & Cheng, G. (2005). The host type I interferon response to viral and bacterial infections. Cell Research, 15(6), 407-422; Gazzinelli R T, Kalantari P, Fitzgerald K A, Golenbock D T. Innate sensing of malaria parasites. Nat Rev Immunol. 2014 November; 14(11):744-57). PRRs recognise, in a non-specific manner, conserved molecular motifs called Pathogen Associated Molecular Patterns, or PAMPs. The cellular pathways and conserved response to PRR stimulation are well documented and includes the production of Type I interferons (Type I IFNs), tumor necrosis factor (TNF) and interleukins. Whilst different pathogens may use different initial receptors they activate common downstream molecules which ultimately leads to the production of Type I IFNs, IFN and interleukins. The variable downstream effects of these cytokine molecules are dependent upon a number of factors including cell source, concentration, receptor density, receptor avidity and affinity, cell type (Hall, J. C., & Rosen, A. (2010). Type I interferons: crucial participants in disease amplification in autoimmunity. Nature Reviews Rheumatology, 6(1), 40-49; Wajant, H., Pfizenmaier, K., & Scheurich, P. (2003). Tumor necrosis factor signaling. Cell Death and Differentiation, 10(1), 45-65). Accordingly, the host immune system responds to a pathogenic infection in both a generalized (often innate) and specific (often adaptive) manner.

[0015] The purported “gold standard” of diagnosis for bacterial infection is culture (growth of an organism and partial or complete identification by staining or biochemical or serological assays). Thus, confirmation of a diagnosis of BaSIRS requires isolation and identification of live bacteria from blood or tissue or body fluid samples using culture, but this technique has its limitations (Thierry Calandra and Jonathan Cohen, “The International Sepsis Forum Consensus Conference on Definitions of Infection in the Intensive Care Unit,” Critical Care Medicine 33, no. 7 (July 2005): 1538-1548; R Phillip Dellinger et al., “Surviving Sepsis Campaign: International Guidelines for Management of Severe Sepsis and Septic Shock: 2008.,” vol. 36, 2008, 296-327, doi:10.1097/01.CCM.0000298158.12101.41). Bacterial culture usually takes a number of days to obtain a positive result and over five days (up to a month) to confirm a negative result. A positive result confirms bacteremia if the sample used was whole blood. However, blood culture is insufficiently reliable with respect to sensitivity, specificity and predictive value, failing to detect a clinically determined ‘bacterial’ cause of fever in 60-80% of patients with suspected primary or secondary bloodstream infection, and in many instances the organism grown is a contaminant (Müller, B., Schuetz, P. & Trampuz, A. Circulating biomarkers as surrogates for bloodstream infections. International Journal of Antimicrobial Agents 30, 16-23 (2007); Jean-Louis Vincent et al., Sepsis in European Intensive Care Units: Results of the SOAP Study, Critical Care Medicine 34, no. 2 (February 2006): 344-353; Brigitte Lamy et al., What Is the Relevance of Obtaining Multiple Blood Samples for Culture? A Comprehensive Model to Optimize the Strategy for Diagnosing Bacteremia, Clinical Infectious Diseases: an Official Publication of the Infectious Diseases Society of America 35, no. 7 (Oct. 1, 2002): 842-850; M D Aronson and D H Bor, Blood Cultures”, Annals of Internal Medicine 106, no. 2 (February 1987): 246-253); Bates, D. W., Goldman, L. & Lee, T. H. Contaminant blood cultures and resource utilization. The true consequences of false-positive results. JAMA 265, 365-369 (1991)). Potential consequences of the diagnostic limitations of bacterial culture in patients suspected of having BaSIRS include; the overuse and misuse of broad-spectrum antibiotics, the development of antimicrobial resistance and Clostridium difficile infection, adverse drug reactions, and increased treatment and testing costs. Antimicrobial resistance is becoming a significant problem in critical care patient management, particularly with Gram-negative bacilli (Hotchkiss and Donaldson. 2006, Nature Reviews Immunology 6:813-822; Eber et al., 2010, Arch Intern Med. 170(4):374-353). Recent evidence suggests that indiscriminate use of antibiotics has contributed to resistance and hence guidance on antibiotic treatment duration is now imperative in order to reduce consumption in tertiary care ICU settings (Hanberger et al., 1999, JAMA. 281:61-71). Molecular nucleic acid-based tests have been developed to detect the major sepsis-causing bacterial pathogens in whole blood from patients with suspected sepsis (e.g., SeptiFast® from Roche, Iridica® from Abbott, Sepsis Panel from Biofire (Biomerieux), Prove-it® Sepsis from Mobidiag). Whilst sensitive and specific, such assays have limitations, especially with respect to clinical interpretation of assay results for suspected sepsis patients that are 1) PCR or assay positive and blood culture negative, and 2) PCR or assay negative (Bauer M, Reinhart K (2010) Molecular diagnostics of sepsis—Where are we today? International Journal of Medical Microbiology 300: 411-413). Thus, blood culture, at least in the minds of clinicians, remains the gold standard for diagnosis of sepsis (BaSIRS) because the results of molecular pathogen detection assays are difficult to interpret in isolation.

[0016] Currently, diagnosis of viral conditions is challenging. In general, the conventional method for diagnosing viral infection is cell culture and isolation (growth of virus in cell culture, observation of cytopathic effect (CPE) or hemadsorption (HAD), and partial or complete identification by staining or biochemical or immunoassay (e.g., immunofluorescence)) (Hsiung, G. D. 1984. Diagnostic virology: from animals to automation. Yale J. Biol. Med. 57:727-733; Leland D S, Ginocchio C C (2007) Role of Cell Culture for Virus Detection in the Age of Technology. Clinical Microbiology Reviews 20: 49-78). This method has limitations in that it requires; appropriate transport of the clinical sample in an appropriate virus-preservation medium, an initial strong suspicion of what the infecting virus might be (to select a suitable cell line that will grow the suspected virus), a laboratory having suitable expertise, equipment and cell lines, and, once these conditions are all in place, a lengthy incubation period (days to weeks) to grow the virus. The process is laborious and expensive.

[0017] With respect to improving the diagnosis of viral conditions, and more recently, sensitive and specific assays such as those using monoclonal antibodies or nucleic acid amplification have become available and are now widely available and used in diagnostic laboratories. Amplification of viral DNA and RNA (e.g., PCR) and viral antigen detection are fast and do not require the lengthy incubation period needed for viral isolation in cell cultures, may involve less technical expertise, and are sensitive enough to be useful for viruses that do not proliferate in standard cell cultures. Molecular detection of viral DNA and RNA also has its limitations in that an initial strong suspicion of what the infecting virus might be is also required (to use specific PCR primers and probes, for example), the method detects both live and dead virus, and most molecular tests are designed to detect only one type of virus and, as such, will only detect one type of virus. By way of example, it has been shown that mixed respiratory infections occur in up to 15% of immunocompetent children and that such mixed infections lead to an increase in disease severity (Waner, J. L. 1994. Mixed viral infections: detection and management. Clin. Microbiol. Rev. 7:143-151). A PCR designed to only one type of virus will not detect a mixed infection if the primers and probes are not specific to all viruses present in the clinical specimen. To cover the possibility of a mixed infection, as well as to cover multiple possible viral causes or strains, there are some commercially available assays capable of detecting more than one virus and/or strain at a time (e.g., BioMerieux, BioFire, FilmArray®, Respiratory Panel; Luminex, xTAG® Respiratory Viral Panel). Such an approach is especially useful in confirming an infective agent if clinical signs are pathognomonic or if a particular body system is affected (e.g., respiratory tract or gastrointestinal tract). Further, there are techniques that allow for amplification of viral DNA of unknown sequence which could be useful in situations where the clinical signs are generalized, for viruses with high mutation rates, for new and emerging viruses, or for detecting biological weapons of man-made nature (Clem et al. (2007) Virus detection and identification using random multiplex (RT)-PCR with 3′-locked random primers. Virol J 4: 65; Liang et al. (1992) Differential display of eukaryotic messenger RNA by means of the polymerase chain reaction. Science 257(5072):967-971; Nie X et al. (2001) A novel usage of random primers for multiplex RT-PCR detection of virus and viroid in aphids, leaves, and tubers. J Virol Methods 91(1):37-49; Ralph et al. (1993) RNA fingerprinting using arbitrarily primed PCR identifies differentially regulated RNAs in mink lung (Mv1Lu) cells growth arrested by transforming growth factor beta 1. Proc Natl Acad Sci USA 90(22):10710-10714.). Further, a microarray has been designed to detect every known virus for which there is DNA sequence information in GenBank (called “Virochip”) (Greninger, A. L., Chen, E. C., Sittler, T., Scheinerman, A., Roubinian, N., Yu, G., et al. (2010). A metagenomic analysis of pandemic influenza A (2009 H1N1) infection in patients from North America. PLoS ONE, 5(10), e13381; Chiu C Y, Greninger A L, Kanada K, Kwok T, Fischer K F, et al. (2008) Identification of cardioviruses related to Theiler's murine encephalomyelitis virus in human infections. Proc Natl Acad Sci USA 105: 14124-14129). The use of such a microarray for diagnostic purposes in human patients presenting with clinical signs of SIRS is perhaps superfluous since there is only a limited number of human viruses that are known to cause SIRS (see TABLES 1 and 2). However, a more directed microarray using just those human viruses that are known to cause SIRS could be used for the purpose outlined in this patent.

[0018] It has been shown that the use of molecular detection methods, compared to conventional detection methods, in patients with lower respiratory tract infections did not significantly change the treatment regimen but led to an overall increase in cost of patient management (Oosterheert J J, van Loon A M, Schuurman R, Hoepelman A I M, Hak E, et al. (2005) Impact of rapid detection of viral and atypical bacterial pathogens by real-time polymerase chain reaction for patients with lower respiratory tract infection. Clinical Infectious Diseases 41: 1438-1444). Thus, the availability of faster and more sensitive molecular detection assays for pathogens does not necessarily positively impact clinical decision making, patient outcome, antibiotic use, adoption or hospital econometrics. Further, pathogen detection assays for viruses have limitations in that the results are often difficult to interpret in a clinical context when used in isolation. Thus, the diagnosis of a viral infection, and if a virus is isolated or identified whether it is pathogenic or not, cannot always be made simply by determining the presence of such an organism in a host sample.

[0019] In some instances, detection of host antibodies to an infecting virus remains the diagnostic gold standard, because either the virus cannot be grown, or the presence of virus in a biological fluid is transient (e.g., arboviral infections) and therefore cannot be detected at times when the patient is symptomatic. Antibody detection also has limitations including: it usually takes at least 10 days for a host to generate detectable and specific immunoglobulin G antibodies in a primary infection, by which time the clinical signs have often abated; anti-viral antibodies following a primary infection can persist for a long period making it difficult to interpret the timing of an infection relapse for viruses that show latency; a specific test must be ordered to detect a specific virus. These limitations make it difficult to determine when the host was infected, whether high antibody titers to a particular virus means that a particular virus is the causative agent of the presenting clinical signs, and which test to order. In some instances the ratio of IgM to IgG antibodies can be used to determine the recency of virus infection. IgM is usually produced early in the immune response and is non-specific, whereas IgG is produced later in the immune response and is specific. Examples of the use of this approach include the diagnosis of hepatitis E (Tripathy et al. (2012). Cytokine Profiles, CTL Response and T Cell Frequencies in the Peripheral Blood of Acute Patients and Individuals Recovered from Hepatitis E Infection. PLoS ONE, 7(2), e31822), dengue (SA-Ngasang et al. (2005). Specific IgM and IgG responses in primary and secondary dengue virus infections determined by enzyme-linked immunosorbent assay. Epidemiology and Infection, 134(04), 820), and Epstein-Barr Virus (Hess, R. D. (2004). Routine Epstein-Barr Virus Diagnostics from the Laboratory Perspective: Still Challenging after 35 Years. Journal of Clinical Microbiology, 42(8), 3381-3387). The IgM/IgG ratio approach also suffers from the limitation that the clinician must know which specific test to order a priori.

[0020] Parasitic diseases place a heavy burden on human health worldwide with the majority of people affected living in developing countries. However, protozoan parasites are the most common parasitic infection and affect humans irrespective of whether they live in a first or third world country as more and more people become immunocompromised as a result of human immunodeficiency virus (HIV) infection, organ transplant or chemotherapy (Stark D, Barratt J L N, van Hal S, Marriott D, Harkness J, et al. (2009) Clinical Significance of Enteric Protozoa in the Immunosuppressed Human Population. Clinical Microbiology Reviews 22: 634-650). Common and well-known protozoan human pathogens include Plasmodium (malaria), Leishmania (leishmaniasis), Trypanosoma (sleeping sickness and Chagas disease), Cryptosporidium, Giardia, Toxoplasma, Babesia, Balantidium and Entamoeba. Common and well-known protozoan human pathogens that can be found in peripheral blood (causing a parasitemia) include Plasmodium falciparum, Plasmodium ovale, Plasmodium malariae, Plasmodium vivax, Leishmania donovani, Trypanosoma brucei, Trypanosoma cruzi, Toxoplasma gondii and Babesia microti. Diagnosis of protozoal infections is achieved by pathogen detection using a variety of methods including light microscopy, or antigen or nucleic acid detection using different techniques such as tissue biopsy and histology, fecal or blood smears and staining, ELISA, lateral flow immunochromatography, and nucleic acid amplification. These methods of diagnosis have limitations including the fact that they often require special stains and skilled personnel, the sample taken has to have the parasite present, and often the parasite is opportunistic, meaning that many people are carriers of such parasites and do not show clinical signs until their immune system is compromised. As a result, such pathogen detection assays for protozoan parasites are difficult to interpret in a clinical context when used in isolation.

[0021] Diagnosis of non-infectious SIRS is often by default—that is, elimination of an infection as a cause of SIRS.

[0022] Thus, the diagnosis of a bacterial, viral or parasitic infection, and if an organism is isolated or identified, whether it is pathogenic or not, cannot always be made simply by determining the presence of such an organism in a host sample.

[0023] In the absence of a gold standard assay for diagnosis of a condition a combination of tests or parameters, or the use of a group of experts, can be used (Hui, S. L. and X. H. Zhou (1998). Evaluation of diagnostic tests without gold standards. Statistical Methods in Medical Research 7(4), 354-370; Zhang, B., Chen, Z. & Albert, P. S. Estimating diagnostic accuracy of raters without a gold standard by exploiting a group of experts. Biometrics 68, 1294-1302 (2012); Reitsma, J. B., Rutjes, A. W. S., Khan, K. S., Coomarasamy, A. & Bossuyt, P. M. A review of solutions for diagnostic accuracy studies with an imperfect or missing reference standard. J Clin Epidemiol 62, 797-806 (2009)). In the absence of a gold standard test for BaSIRS a clinical diagnosis is provided by the physician(s) at the time the patient presents and in the absence of any results from diagnostic tests. This is done in the interests of rapid treatment and positive patient outcomes. Such an approach has proven to be reasonably reliable (AUC ˜0.88) in children but only with respect to differentiating between patients ultimately shown to be blood culture positive and those that were judged to be unlikely to have an infection at the time antibiotics were administered (Fischer, J. E. et al. Quantifying uncertainty: physicians' estimates of infection in critically ill neonates and children. Clin. Infect. Dis. 38, 1383-1390 (2004)). In Fischer et al., (2004), 54% of critically ill children were put on antibiotics during their hospital stay, of which only 14% and 16% had proven systemic bacterial infection or localized infection respectively. In this study, 53% of antibiotic treatment courses for critically ill children were for those that had an unlikely infection and 38% were antibiotic treatment courses for critically ill children as a rule-out treatment episode. Clearly, pediatric physicians err on the side of caution with respect to treating critically ill patients by placing all suspected BaSIRS patients on antibiotics—38% of all antibiotics used in critically ill children are used on the basis of ruling out BaSIRS, that is, are used as a precaution. The risks of not correctly diagnosing BaSIRS are profound (Dellinger, R. P. et al. Surviving Sepsis Campaign: international guidelines for management of severe sepsis and septic shock: 2008. in Crit. Care Med. 36, 296-327 (2008)). Thus, making a diagnosis of BaSIRS (ruling in) carries much less clinical risk than making a diagnosis of InSIRS (ruling out BaSIRS and VaSIRS and PaSIRS).

[0024] Therefore, with respect to correctly diagnosing BaSIRS, blood culture has unacceptably low negative predictive value (NPV), or unacceptably high false negative levels. With respect to correctly diagnosing BaSIRS, clinical diagnosis has unacceptably low positive predictive value (PPV), or unacceptably high false positive levels. In the latter instance the consequence is that many patients are unnecessarily prescribed antibiotics because of 1) the clinical risk of misdiagnosing BaSIRS, 2) the lack of a gold standard diagnostic test, and 3) the fact that blood culture results take too long to provide results that are clinically actionable.

[0025] Diagnosis of a viral infection, including VaSIRS, is often done based on presenting clinical signs only. The reasons for this are; most viral infections are not life-threatening, there are few therapeutic interventions available, many viral infections cause the same clinical signs, and most diagnostic assays take too long and are too expensive. The consequence is that many VaSIRS patients are unnecessarily prescribed antibiotics because of the clinical risk of misdiagnosing BaSIRS.

[0026] Diagnosis of a parasitic infection, including PaSIRS, is based on presenting clinical signs, detection of the parasite and, in areas with low parasite prevalence, exclusion of more common bacterial and viral causes. The consequence is that many PaSIRS patients are misdiagnosed, diagnosed late in the course of disease progression, or unnecessarily prescribed antibiotics because of the clinical risk of misdiagnosing BaSIRS.

[0027] Alternative diagnostic approaches to BaSIRS have been investigated including determination of host response using biomarkers (Michael Bauer and Konrad Reinhart, “Molecular Diagnostics of Sepsis—Where Are We Today?” International Journal of Medical Microbiology 300, no. 6 (Aug. 1, 2010): 411-413, doi:10.1016/j.ijmm.2010.04.006; John C Marshall and Konrad Reinhart, “Biomarkers of Sepsis,” Critical Care Medicine 37, no. 7 (July 2009): 2290-2298, doi:10.1097/CCM.0b013e3181a02afc.). A systematic literature search identified nearly 180 molecules as potential biomarkers of sepsis of which 20% have been assessed in appropriately designed sepsis studies including C-reactive protein (CRP), procalcitonin (PCT), and IL6 (Reinhart, K., Bauer, M., Riedemann, N. C. & Hartog, C. S. New Approaches to Sepsis: Molecular Diagnostics and Biomarkers. Clinical Microbiology Reviews 25, 609-634 (2012)).

[0028] Alternative diagnostic approaches to VaSIRS have been investigated including determination of host response using biomarkers to specific viruses (Huang Y, Zaas A K, Rao A, Dobigeon N, Woolf P J, et al. (2011) Temporal Dynamics of Host Molecular Responses Differentiate Symptomatic and Asymptomatic Influenza A Infection. PLoS Genet 7: e1002234; Wang Y, Dennehy P H, Keyserling H L, Tang K, Gentsch J R, et al. (2007) Rotavirus Infection Alters Peripheral T-Cell Homeostasis in Children with Acute Diarrhea. Journal of Virology 81: 3904-3912), and in one instance a common signature to a number of respiratory viruses has been published in two separate scientific papers (Zaas A K, Chen M, Varkey J, Veldman T, Hero A O III, et al. (2009) Gene Expression Signatures Diagnose Influenza and Other Symptomatic Respiratory Viral Infections in Humans. Cell Host & Microbe 6: 207-217; Tsalik, E. L., Henao, R., Nichols, M., Burke, T., Ko, E. R., McClain, M. T., et al. (2016). Host gene expression classifiers diagnose acute respiratory illness etiology. Science Translational Medicine, 8(322), 322ra11-322ra11).

[0029] Alternative diagnostic approaches to PaSIRS have been investigated including determination of host response using biomarkers (Ockenhouse C F, Hu W C, Kester K E, Cummings J F, Stewart A, et al. (2006) Common and Divergent Immune Response Signaling Pathways Discovered in Peripheral Blood Mononuclear Cell Gene Expression Patterns in Presymptomatic and Clinically Apparent Malaria. Infection and Immunity 74: 5561-5573; Chaussabel D, Semnani R T, McDowell M A, Sacks D et al. Unique gene expression profiles of human macrophages and dendritic cells to phylogenetically distinct parasites. Blood 2003 Jul. 15; 102(2):672-81).

[0030] The acute management plans for patients with BaSIRS, VaSIRS, PaSIRS and InSIRS are different. For best patient outcomes, it is important that those patients who have a suspected infection, or are at high risk of infection, are identified early and graded and monitored in order to initiate evidence-based and goal-orientated medical therapy, including early use of antibiotics, anti-viral or anti-parasitic therapies. An assay that is reliable, fast, and able to determine the presence or absence of a pathogen infection in patients with systemic inflammation will assist clinicians in making appropriate patient management and treatment decisions. In a background of high prevalence of systemic inflammation and unreliable pathogen detection assays, what is needed is a diagnostic assay that combines specific detection of systemic inflammation biomarkers with broad-range pathogen detection assays so that patients presenting with clinical signs of systemic inflammation can be confidently categorized into InSIRS, BaSIRS, VaSIRS and PaSIRS. Patients negative for both pathogen associated SIRS and pathogen detection assays can be “ruled out” as having an infection. Such an assay would have high negative predictive value for systemic pathogen infection which would have high clinical utility by allowing clinicians to confidently withhold therapies, in particular antibiotics. Patients positive for both pathogen associated SIRS and pathogen detection assays can be “ruled in” as having a particular type of infection (or mixed infection). Such an assay would have high positive predictive value for systemic pathogen infection allowing clinicians to confidently manage and treat patients.

[0031] Testing for microbes, viruses and parasites requires that clinical samples be taken from patients. Examples of clinical samples include; blood, plasma, serum, cerebrospinal fluid (CSF), stool, urine, tissue, pus, saliva, semen, skin, other body fluids. Examples of clinical sampling methods include; venipuncture, biopsy, scrapings, aspirate, lavage, collection of body fluids and stools into sterile containers. Most clinical sampling methods are invasive (physically or on privacy), or painful, or laborious, or require multiple samplings, or, in some instances, dangerous (e.g., large CSF volumes in neonates). The taking of blood via venipuncture is perhaps the least invasive method of clinical sampling and, in the case of BaSIRS, VaSIRS, PaSIRS and InSIRS, the most relevant. As such, in a background of high prevalence of SIRS, what is needed is a diagnostic assay, based on the use of a peripheral blood sample, with a high predictive value for BaSIRS so that clinicians can confidently rule out, or rule in, a bacterial cause of SIRS.

[0032] Therefore, a need exists for better ways of differentiating patients presenting with systemic inflammation to permit early diagnosis, ruling out or ruling in infection, monitoring, and making better treatment and management decisions.

### SUMMARY OF THE INVENTION

[0033] In work leading up to the present invention, it was determined that derived biomarker values that are indicative of a ratio of measured biomarkers values (e.g., biomarker levels) provide significantly more diagnostic power than measured biomarker values alone for assessing the likelihood that a particular condition, or degree thereof, is present or absent in a subject (see, WO 2015/117204). The present inventors have now determined that the vast majority of derived biomarker values in peripheral blood cells are shared between patients within different SIRS subgroups (e.g., BaSIRS, VaSIRS, PaSIRS and InSIRS), which suggests, therefore, that there are numerous biochemical pathways that are common to SIRS conditions of different etiology. Accordingly, it was reasoned that it would be necessary to subtract biomarker combinations corresponding to these derived biomarker values (also referred to herein as “derived biomarkers”) from the pool of biomarker combinations to identify derived biomarkers with improved specificity to a particular SIRS condition. Of note, it was also found that exclusion of derived biomarkers belonging to any one particular SIRS subgroup (e.g., PaSIRS) from the pool of derived biomarkers markedly changed the biomarker combinations resulting from the analysis and undermined their specificity for diagnosing individual SIRS conditions.

[0034] The present inventors have also determined that derived biomarker values in peripheral blood cells can vary between subjects with different non-SIRS inflammatory conditions including autoimmunity, asthma, stress, anaphylaxis, trauma and obesity, and between subjects of different age, gender and race. This suggests, therefore, that the corresponding derived biomarkers also need to be subtracted from the pool of derived biomarkers to identify biomarker combinations with improved specificity to a SIRS condition of specified etiology.

[0035] The present invention is also predicated in part on the identification of derived biomarkers with remarkable specificity to systemic inflammations caused by a range of different viral infections across different mammals (humans, macaques, chimpanzees, pigs, rats, mice). Because such derived biomarkers are specific to systemic inflammations associated with a variety of different types of viruses covering examples from each of the Baltimore classification groups (I-VII), they are considered to be “pan-viral” inflammatory derived biomarkers. To ensure that the derived biomarkers described herein are truly pan-viral and also specific to a viral infection, the following procedures and methods were deliberately performed: 1). A mixture of both DNA and RNA viruses were included in the “discovery” core datasets—only those derived biomarkers with strong performance across all of these datasets were selected for further analysis, 2). A wide range of virus families, including both DNA and RNA viruses, were included in the various “validation” datasets, 3). A wide range of virus families causing a variety of clinical signs were included in the various datasets, 4). Viruses covering all of the Baltimore Classification categories were included in the various datasets, 5). Viruses and samples covering a variety of stage of infection, infection type, mechanism of spread and location were included in the various datasets, 6). Controlled and time-course datasets were selected to cover more than one species of mammal (humans, macaques, chimpanzees, pigs, mice), 7). In time-course studies samples early in the infection process were chosen, prior to peak clinical signs, to limit the possibility of a bacterial co-infection, 8). Derived biomarkers shared with other inflammatory conditions were subtracted (e.g., derived biomarkers for BaSIRS, PaSIRS and InSIRS, as well as derived biomarkers for autoimmunity, asthma, bacterial infections, sarcoidosis, stress, anaphylaxis, trauma, age, obesity, gender and race), 9). Validation was performed in both adults and children with a variety of viral conditions. Following the stringent selection process only those derived biomarkers with an AUC greater than existing virus assays and clinical judgment were selected to ensure clinical utility.

[0036] The present inventors further propose that the host response specific derived biomarkers for BaSIRS, VaSIRS, PaSIRS and InSIRS disclosed herein can be used advantageously with pathogen specific biomarkers to augment the diagnosis of the etiological basis of systemic inflammation including determining whether systemic inflammation in a patient is due to a bacterial, viral, or protozoal infection, or due to some other non-infectious cause. The use of a combination of host response derived biomarkers and pathogen-specific biomarkers provides a more definitive diagnosis, especially the ability to either rule out or rule in a particular condition in patients with systemic inflammation, especially in situations where pathogen detection assay results are suspected of being either falsely positive or negative.

[0037] Based on the above determinations, the present inventors have developed various methods, apparatus, compositions, and kits, which take advantage of derived biomarkers, and optionally in combination with pathogen-specific detection assays, to determine the etiology, presence, absence or degree of a SIRS condition of a specified etiology (e.g., BaSIRS, VaSIRS, PaSIRS or InSIRS) in subjects presenting with fever or clinical signs of systemic inflammation. In certain embodiments, these methods, apparatus, compositions, and kits represent a significant advance over prior art processes and products, which have not been able to: 1) distinguish the various etiologies of systemic inflammation; and/or 2) determine the contribution of a particular type of infection (if any) to the presenting clinical signs and pathology; and/or 3) determine if an isolated or detected microorganism is a true pathogen, a commensal, a normal component of the microbiome, a contaminant, or an incidental finding. Such a combination of information provides strong positive and negative predictive power, which in turn provides clinicians with the ability to make better informed management and treatment decisions.

[0038] Accordingly, in one aspect, the present invention provides methods for determining an indicator used in assessing a likelihood of a subject having a presence, absence or degree of BaSIRS or VaSIRS. These methods generally comprise, consist or consist essentially of: (1) determining a plurality of host response specific biomarker values including a plurality of BaSIRS biomarker values and a plurality of VaSIRS biomarker values, the plurality of BaSIRS biomarker values being indicative of values measured for a corresponding plurality of BaSIRS biomarkers in a sample taken from the subject, the plurality of VaSIRS biomarker values being indicative of values measured for a corresponding plurality of VaSIRS biomarkers in the sample; (2) determining a plurality of host response specific derived biomarker values including at least one BaSIRS derived biomarker value and at least one VaSIRS derived biomarker value, each derived BaSIRS biomarker value being determined using at least a subset of the plurality of BaSIRS biomarker values, and being indicative of a ratio of levels of a corresponding at least a subset of the plurality of BaSIRS biomarkers, and each derived VaSIRS biomarker value being determined using at least a subset of the plurality of VaSIRS biomarker values, and being indicative of a ratio of levels of a corresponding at least a subset of the plurality of VaSIRS biomarkers; and (3) determining the indicator using the plurality of host response specific derived biomarker values, wherein the at least a subset of BaSIRS biomarkers forms a BaSIRS derived biomarker combination which is not a derived biomarker combination for VaSIRS, PaSIRS or InSIRS, and wherein the at least a subset of VaSIRS biomarkers forms a VaSIRS derived biomarker combination which is not a derived biomarker combination for BaSIRS, PaSIRS or InSIRS. Typically, in any of the aspects or embodiments described herein, the subject has at least one clinical sign (e.g., 1, 2, 3, 4, 5 or more) of SIRS.

[0039] Suitably, in any aspect or embodiments disclosed herein, the BaSIRS derived biomarker combination and the VaSIRS derived biomarker combination are not derived biomarker combinations for any one or more inflammatory conditions selected from autoimmunity, asthma, stress, anaphylaxis, trauma and obesity. Alternatively, or in addition, the derived BaSIRS biomarkers and derived VaSIRS biomarkers are not derived biomarkers for any one or more of age, gender and race.

[0040] In any of the aspects or embodiments disclosed herein, the methods may further comprise: (a) determining a plurality of pathogen specific biomarker values including at least one bacterial biomarker value and at least one viral biomarker value, the least one bacterial biomarker value being indicative of a value measured for a corresponding bacterial biomarker in the sample, the least one viral biomarker value being indicative of a value measured for a corresponding viral biomarker in the sample; and (b) determining the indicator using the host response specific derived biomarker values in combination with the pathogen specific biomarker values. Suitably, in some of these aspects or embodiments, the indicator is also used to rule in or rule out a SIRS condition of a particular etiology. For example, if the plurality of host response specific derived biomarker values indicates the likely presence of a pathogen-associated SIRS condition (e.g., BaSIRS, VaSIRS or InSIRS) in the subject and the pathogen specific biomarker value(s) indicate(s) the likely presence of a pathogen (e.g., bacterium, virus, protozoan) associated with the pathogen-associated SIRS condition in the subject, then the indicator determined using the combination of host response specific derived biomarker values and pathogen specific biomarker value(s) can be used to rule in the pathogen-associated SIRS condition. Alternatively, if the plurality of host response specific derived biomarker values indicates the likely absence of a pathogen-associated SIRS condition (e.g., BaSIRS, VaSIRS or InSIRS) in the subject and the pathogen specific biomarker value(s) indicate(s) the likely absence of a pathogen (e.g., bacterium, virus, protozoan) associated with the pathogen-associated SIRS condition in the subject, then the indicator determined using the combination of host response specific derived biomarker values and pathogen specific biomarker value(s) can be used to rule out the pathogen-associated SIRS condition.

[0041] Suitably, in any of the aspects or embodiments disclosed herein, each BaSIRS derived biomarker value is determined using a pair of the BaSIRS biomarker values, and is indicative of a ratio of levels of a corresponding pair of BaSIRS biomarkers. Alternatively, or in addition, each VaSIRS derived biomarker value is determined using a pair of the VaSIRS biomarker values, and is indicative of a ratio of levels of a corresponding pair of VaSIRS biomarkers.

[0042] In some embodiments, the plurality of host response specific biomarker values further includes a plurality of PaSIRS biomarker values, the plurality of PaSIRS biomarker values being indicative of values measured for a corresponding plurality of PaSIRS biomarkers in the sample, and the plurality of host response specific derived biomarker values further includes at least one PaSIRS derived biomarker value, and the methods further comprise: determining each PaSIRS derived biomarker value using at least a subset of the plurality of PaSIRS biomarker values, the PaSIRS derived biomarker value being indicative of a ratio of levels of a corresponding at least a subset of the plurality of PaSIRS biomarkers; and determining the indicator using the plurality of host response specific derived biomarker values, wherein the at least a subset of PaSIRS biomarkers forms a PaSIRS derived biomarker combination which is not a derived biomarker combination for BaSIRS, VaSIRS or InSIRS.

[0043] Suitably, in any of the aspects or embodiments disclosed herein, each PaSIRS derived biomarker value is determined using a pair of the PaSIRS biomarker values, and is indicative of a ratio of levels of a corresponding pair of PaSIRS biomarkers.

[0044] In a related aspect, the present invention provides methods for determining an indicator used in assessing a likelihood of a subject having a presence, absence or degree of BaSIRS, VaSIRS or PaSIRS. These methods generally comprise, consist or consist essentially of: (1) determining a plurality of host response specific biomarker values including a plurality of BaSIRS biomarker values, a plurality of VaSIRS biomarker values, and a plurality of PaSIRS biomarker values, the plurality of BaSIRS biomarker values being indicative of values measured for a corresponding plurality of BaSIRS biomarkers in a sample taken from the subject, the plurality of VaSIRS biomarker values being indicative of values measured for a corresponding plurality of VaSIRS biomarkers in the sample, the plurality of PaSIRS biomarker values being indicative of values measured for a corresponding plurality of PaSIRS biomarkers in the sample; (2) determining a plurality of host response specific derived biomarker values including at least one BaSIRS derived biomarker value, at least one VaSIRS derived biomarker value, and at least one PaSIRS derived biomarker value, each derived BaSIRS biomarker value being determined using at least a subset of the plurality of BaSIRS biomarker values, and being indicative of a ratio of levels of a corresponding at least a subset of the plurality of BaSIRS biomarkers, each derived VaSIRS biomarker value being determined using at least a subset of the plurality of VaSIRS biomarker values, and being indicative of a ratio of levels of a corresponding at least a subset of the plurality of VaSIRS biomarkers, and each derived PaSIRS biomarker value being determined using at least a subset of the plurality of PaSIRS biomarker values, and being indicative of a ratio of levels of a corresponding at least a subset of the plurality of PaSIRS biomarkers; and (3) determining the indicator using the plurality of host response specific derived biomarker values, wherein the at least a subset of BaSIRS biomarkers forms a BaSIRS derived biomarker combination which is not a derived biomarker combination for VaSIRS, PaSIRS or InSIRS, wherein the at least a subset of VaSIRS biomarkers forms a VaSIRS derived biomarker combination which is not a derived biomarker combination for BaSIRS, PaSIRS or InSIRS, and wherein the at least a subset of PaSIRS biomarkers forms a PaSIRS derived biomarker combination which is not a derived biomarker combination for BaSIRS, VaSIRS or InSIRS.

[0045] In some embodiments, the methods further comprise: (a) determining a plurality of pathogen specific biomarker values including at least one bacterial biomarker value, at least one viral biomarker value and at least one protozoal biomarker value, the at least one bacterial biomarker value being indicative of a value measured for a corresponding bacterial biomarker in the sample, the least one viral biomarker value being indicative of a value measured for a corresponding viral biomarker in the sample, and the least one protozoal biomarker value being indicative of a value measured for a corresponding protozoal biomarker in the sample; and (b) determining the indicator using the host response specific derived biomarker values in combination with the pathogen specific biomarker values.

[0046] In some embodiments of any of the aspects disclosed herein, the plurality of host response specific biomarker values further includes a plurality of InSIRS biomarker values, the plurality of InSIRS biomarker values being indicative of values measured for a corresponding plurality of InSIRS biomarkers in the sample, and the plurality of host response specific derived biomarker values further includes at least one InSIRS derived biomarker value, and the methods further comprise: determining each InSIRS derived biomarker value using at least a subset of the plurality of InSIRS biomarker values, the InSIRS derived biomarker value being indicative of a ratio of levels of a corresponding at least a subset of the plurality of InSIRS biomarkers; and determining the indicator using the plurality of host response specific derived biomarker values, wherein the at least a subset of InSIRS biomarkers forms a InSIRS derived biomarker combination which is not a derived marker combination for BaSIRS, VaSIRS or PaSIRS.

[0047] Accordingly, in a related aspect, the present invention provides methods for determining an indicator used in assessing a likelihood of a subject having a presence, absence or degree of BaSIRS, VaSIRS or InSIRS. These methods generally comprise, consist or consist essentially of: (1) determining a plurality of host response specific biomarker values including a plurality of BaSIRS biomarker values, a plurality of VaSIRS biomarker values, and a plurality of InSIRS biomarker values, the plurality of BaSIRS biomarker values being indicative of values measured for a corresponding plurality of BaSIRS biomarkers in a sample taken from the subject, the plurality of VaSIRS biomarker values being indicative of values measured for a corresponding plurality of VaSIRS biomarkers in the sample, the plurality of InSIRS biomarker values being indicative of values measured for a corresponding plurality of InSIRS biomarkers in the sample; (2) determining a plurality of host response specific derived biomarker values including at least one BaSIRS derived biomarker value, at least one VaSIRS derived biomarker value, and at least one InSIRS derived biomarker value, each derived BaSIRS biomarker value being determined using at least a subset of the plurality of BaSIRS biomarker values, and being indicative of a ratio of levels of a corresponding at least a subset of the plurality of BaSIRS biomarkers, each derived VaSIRS biomarker value being determined using at least a subset of the plurality of VaSIRS biomarker values, and being indicative of a ratio of levels of a corresponding at least a subset of the plurality of VaSIRS biomarkers, and each derived InSIRS biomarker value being determined using at least a subset of the plurality of InSIRS biomarker values, and being indicative of a ratio of levels of a corresponding at least a subset of the plurality of InSIRS biomarkers; and (3) determining the indicator using the plurality of host response specific derived biomarker values, wherein the at least a subset of BaSIRS biomarkers forms a BaSIRS derived biomarker combination which is not a derived biomarker combination for VaSIRS, PaSIRS or InSIRS, wherein the at least a subset of VaSIRS biomarkers forms a VaSIRS derived biomarker combination which is not a derived biomarker combination for BaSIRS, PaSIRS or InSIRS, and wherein the at least a subset of InSIRS biomarkers forms an InSIRS derived biomarker combination which is not a derived biomarker combination for BaSIRS, VaSIRS or PaSIRS.

[0048] In still another related aspect, the present invention provides methods for determining an indicator used in assessing a likelihood of a subject having a presence, absence or degree of BaSIRS, VaSIRS, PaSIRS or InSIRS. These methods generally comprise, consist or consist essentially of: (1) determining a plurality of host response specific biomarker values including a plurality of BaSIRS biomarker values, a plurality of VaSIRS biomarker values, a plurality of PaSIRS biomarker values, and a plurality of InSIRS biomarker values, the plurality of BaSIRS biomarker values being indicative of values measured for a corresponding plurality of BaSIRS biomarkers in a sample taken from the subject, the plurality of VaSIRS biomarker values being indicative of values measured for a corresponding plurality of VaSIRS biomarkers in the sample, the plurality of PaSIRS biomarker values being indicative of values measured for a corresponding plurality of PaSIRS biomarkers in the sample, the plurality of InSIRS biomarker values being indicative of values measured for a corresponding plurality of InSIRS biomarkers in the sample; (2) determining a plurality of host response specific derived biomarker values including at least one BaSIRS derived biomarker value, at least one VaSIRS derived biomarker value, at least one PaSIRS derived biomarker value, and at least one InSIRS derived biomarker value, each derived BaSIRS biomarker value being determined using at least a subset of the plurality of BaSIRS biomarker values, and being indicative of a ratio of levels of a corresponding at least a subset of the plurality of BaSIRS biomarkers, each derived VaSIRS biomarker value being determined using at least a subset of the plurality of VaSIRS biomarker values, and being indicative of a ratio of levels of a corresponding at least a subset of the plurality of VaSIRS biomarkers, each derived PaSIRS biomarker value being determined using at least a subset of the plurality of PaSIRS biomarker values, and being indicative of a ratio of levels of a corresponding at least a subset of the plurality of PaSIRS biomarkers, and each derived InSIRS biomarker value being determined using at least a subset of the plurality of InSIRS biomarker values, and being indicative of a ratio of levels of a corresponding at least a subset of the plurality of InSIRS biomarkers; and (3) determining the indicator using the plurality of host response specific derived biomarker values, wherein the at least a subset of BaSIRS biomarkers forms a BaSIRS derived biomarker combination which is not a derived biomarker combination for VaSIRS, PaSIRS or InSIRS, wherein the at least a subset of VaSIRS biomarkers forms a VaSIRS derived biomarker combination which is not a derived biomarker combination for BaSIRS, PaSIRS or InSIRS, wherein the at least a subset of PaSIRS biomarkers forms a PaSIRS derived biomarker combination which is not a derived biomarker combination for BaSIRS, VaSIRS or InSIRS, and wherein the at least a subset of InSIRS biomarkers forms an InSIRS derived biomarker combination which is not a derived biomarker combination for BaSIRS, VaSIRS or PaSIRS.

[0049] Suitably, in any of the embodiments or aspects disclosed herein, the indicator is determined by combining a plurality (e.g., 2, 3, 4, 5, 6, 7, 8, etc.) of derived biomarker values. For example, the methods may comprise combining the derived biomarker values using a combining function, wherein the combining function is at least one of: an additive model; a linear model; a support vector machine; a neural network model; a random forest model; a regression model; a genetic algorithm; an annealing algorithm; a weighted sum; a nearest neighbor model; and a probabilistic model.

[0050] Exemplary BaSIRS derived biomarker combinations can be selected from TABLE A.

TABLE A
BaSIRS Derived Biomarkers

| | | | |
|---|---|---|---|
| PDGFC:KLRF1 | GAS7:GAB2 | PDGFC:LPIN2 | GALNT2:IK |
| TMEM165:PARP8 | PDGFC:INPP5D | TSPO:NLRP1 | CD82:JARID2 |
| ITGA7:KLRF1 | ST3GAL2:PRKD2 | PCOLCE2:NMUR1 | PDGFC:ICK |
| CR1:GAB2 | HK3:INPP5D | FAM129A:GAB2 | GALNT2:SAP130 |
| PCOLCE2:KLRF1 | ENTPD7:KLRD1 | ALPL:NLRP1 | PDGFC:FBXO28 |
| ITGA7:INPP5D | PDGFC:SIDT1 | TSPO:ZFP36L2 | TSPO:GAB2 |
| GALNT2:CCNK | PDGFC:SPIN1 | ALPL:ZFP36L2 | COX15:INPP5D |
| PDGFC:KLRD1 | PCOLCE2:YPEL1 | PCOLCE2:FOXJ3 | ITGA7:LAG3 |
| PDGFC:CCNK | PDGFC:SYTL2 | PDGFC:KIAA0355 | TSPO:CAMK1D |
| CR1:ADAM19 | PDGFC:TGFBR3 | PDGFC:KIAA0907 | OPLAH:POGZ |
| ITGA7:CCNK | IGFBP7:KLRF1 | GAS7:DOCK5 | ALPL:RNASE6 |
| PCOLCE2:PRSS23 | PCOLCE2:RUNX2 | CD82:CNNM3 | RAB32:NLRP1 |
| TMEM165:PRPF38B | SMPDL3A:KLRD1 | GAS7:EXTL3 | TLR5:SEMA4D |
| PDGFC:PHF3 | GALNT2:KLRF1 | TSPO:RNASE6 | IMPDH1:NLRP1 |
| GAS7:NLRP1 | PDGFC:YPEL1 | ALPL:MME | ALPL:CAMK1D |
| PCOLCE2:KLRD1 | HK3:DENND3 | HK3:TLE3 | TSPO:NFIC |
| GALNT2:KLRD1 | PDGFC:CBLL1 | MCTP1:PARP8 | GAS7:HAL |
| KIAA0101:IL2RB | OPLAH:KLRD1 | TSPO:HCLS1 | PDGFC:NCOA6 |
| CR1:HAL | OPLAH:ZHX2 | TSPO:CASS4 | PDGFC:PIK3C2A |
| PDGFC:RFC1 | PDGFC:RYK | GAS7:RBM23 | TSPO:ADAM19 |
| ENTPD7:KLRF1 | PDGFC:IKZF5 | GAS7:EPHB4 | CD82:NOV |
| PDGFC:GRK5 | GALNT2:INPP5D | PDGFC:RBM15 | PDGFC:PDS5B |
| PCOLCE2:PYHIN1 | PDGFC:GCC2 | ADM:CLEC7A | FIG4:INPP5D |
| GAS7:PRKDC | PDGFC:MBIP | PDGFC:LEPROTL1 | TSPO:NOV |
| GAS7:CAMK1D | COX15:UTRN | PDGFC:NPAT | |
| MGAM:MME | SMPDL3A:QRICH1 | TSPO:PLA2G7 | |

[0051] In specific embodiments, a single BaSIRS derived biomarker combination (e.g., any one from TABLE A) is used for determining the indicator. In other embodiments, two BaSIRS derived biomarker combinations (e.g., any two from TABLE A) are used for determining the indicator. In still other embodiments, three BaSIRS derived biomarker combinations (e.g., any three from TABLE A) are used for determining the indicator. In still other embodiments, four BaSIRS derived biomarker combinations (e.g., any four from TABLE A) are used for determining the indicator.

[0052] In representative examples of this type, the methods comprise: (a) determining a single BaSIRS derived biomarker value using a pair of BaSIRS biomarker values, the single BaSIRS derived biomarker value being indicative of a ratio of levels of first and second BaSIRS biomarkers; and (b) determining the indicator using the single derived BaSIRS biomarker value.

[0053] In other representative examples of this type, the methods comprise: (a) determining a first BaSIRS derived biomarker value using a first pair of BaSIRS biomarker values, the first BaSIRS derived biomarker value being indicative of a ratio of levels of first and second BaSIRS biomarkers; (b) determining a second BaSIRS derived biomarker value using a second pair of BaSIRS biomarker values, the second BaSIRS derived biomarker value being indicative of a ratio of levels of third and fourth BaSIRS biomarkers; and (c) determining the indicator by combining the first and second derived BaSIRS biomarker values, using for example a combining function as disclosed herein.

[0054] In still other representative examples of this type, the methods comprise: (a) determining a first BaSIRS derived biomarker value using a first pair of BaSIRS biomarker values, the first BaSIRS derived biomarker value being indicative of a ratio of levels of first and second BaSIRS biomarkers; (b) determining a second BaSIRS derived biomarker value using a second pair of BaSIRS biomarker values, the second BaSIRS derived biomarker value being indicative of a ratio of levels of third and fourth BaSIRS biomarkers; (c) determining a third BaSIRS derived biomarker value using a third pair of BaSIRS biomarker values, the third BaSIRS derived biomarker value being indicative of a ratio of levels of fifth and fourth BaSIRS biomarkers; and (d) determining the indicator by combining the first and sixth derived BaSIRS biomarker values, using for example a combining function as disclosed herein.

[0055] In certain embodiments, individual BaSIRS derived biomarker combinations are selected from TSPO:HCLS1, OPLAH:ZHX2, TSPO:RNASE6; GAS7:CAMK1D, ST3GAL2:PRKD2, PCOLCE2:NMUR1 and CR1:HAL. In preferred embodiments, individual BaSIRS derived biomarker combinations are selected from OPLAH:ZHX2 and TSPO:HCLS1.

[0056] The bacterium associated with the BaSIRS is suitably selected from any Gram positive or Gram negative bacterial species which is capable of inducing at least one of the clinical signs of SIRS.

[0057] Typical VaSIRS derived biomarker combinations are suitably selected from TABLE B.

TABLE B
VaSIRS Derived Biomarker

| | | | |
|---|---|---|---|
| IFI6:IL16 | OASL:SERTAD2 | OASL:KIAA0247 | OASL:TOPORS |
| OASL:NR3C1 | OASL:LPAR2 | OASL:ARHGAP26 | EIF2AK2:IL16 |
| OASL:EMR2 | OASL:ITGAX | OASL:LYN | OASL:NCOA1 |
| OASL:SORL1 | OASL:TGFBR2 | OASL:PCBP2 | OASL:PTGER4 |
| OASL:TLR2 | OASL:ARHGAP25 | OASL:XPO6 | OASL:GNAQ |
| OASL:PACSIN2 | OASL:GNA12 | OASL:ATP6V1B2 | OASL:GSK3B |
| OASL:LILRA2 | OASL:NUMB | OASL:CSF2RB | OASL:IL6R |
| OASL:PTPRE | OASL:CREBBP | OASL:GYPC | OASL:MAPK14 |
| OASL:RPS6KA1 | OASL:PINK1 | OASL:IL4R | USP18:TGFBR2 |
| OASL:CASC3 | OASL:PITPNA | OASL:MMP25 | ISG15:LTB |
| OASL:VEZF1 | OASL:SEMA4D | OASL:PSEN1 | OASL:INPP5D |
| OASL:CRLF3 | OASL:TGFBI | OASL:SH2B3 | OASL:MED13 |
| OASL:NDEL1 | OASL:APLP2 | OASL:STAT5A | OASL:MORC3 |
| OASL:RASSF2 | OASL:CCNG2 | ISG15:IL16 | OASL:PTAFR |
| OASL:TLE4 | OASL:MKRN1 | MX1:LEF1 | OASL:RBM23 |
| OASL:CD97 | OASL:RGS14 | OASL:CAMK2G | OASL:SNN |
| OASL:CEP68 | OASL:LYST | OASL:ETS2 | OASL:ST13 |
| OASL:RXRA | OASL:TNRC6B | OASL:POLB | OASL:TFEB |
| OASL:SP3 | OASL:TYROBP | OASL:STK38L | OASL:ZFYVE16 |
| OASL:ABLIM1 | OASL:WDR37 | OASL:TFE3 | EIF2AK2:SATB1 |
| OASL:AOAH | OASL:WDR47 | OASL:ICAM3 | OASL:ABAT |
| OASL:MBP | UBE2L6:IL16 | OASL:ITGB2 | OASL:ABI1 |
| OASL:NLRP1 | OASL:BTG1 | OASL:PISD | OASL:ACVR1B |
| OASL:PBX3 | OASL:CD93 | OASL:PLXNC1 | OASL:GPSM3 |
| OASL:PTPN6 | OASL:DCP2 | OASL:SNX27 | OASL:MPPE1 |
| OASL:RYBP | OASL:FYB | OASL:TNIP1 | OASL:PTEN |
| OASL:IL13RA1 | OASL:MAML1 | OASL:ZMIZ1 | OASL:SEC62 |
| OASL:LCP2 | OASL:SNRK | OASL:FOXO3 | IFI6:MYC |
| OASL:LRP10 | OASL:USP4 | OASL:IL10RB | IFI6:PCF11 |
| OASL:SYPL1 | OASL:YTHDF3 | OASL:MAP3K5 | OASL:AIF1 |
| OASL:VAMP3 | OASL:CEP170 | OASL:POLD4 | OASL:CSNK1D |
| IFI44:LTB | OASL:PLEKHO2 | OASL:ARAP1 | OASL:GABARAP |
| OASL:ARHGEF2 | OASL:SMAD4 | OASL:CTBP2 | OASL:HAL |
| OASL:CTDSP2 | OASL:ST3GAL1 | OASL:DGKA | OASL:LAPTM5 |
| OASL:LST1 | OASL:ZNF292 | OASL:NFYA | OASL:XPC |
| OASL:MAPK1 | IFI44:IL4R | OASL:PCNX | USP18:NFKB1 |
| OASL:N4BP1 | OASL:HPCAL1 | OASL:PFDN5 | OASL:ACAP2 |
| OASL:STAT5B | OASL:IGSF6 | OASL:R3HDM2 | OASL:CLEC4A |
| IFI44:ABLIM1 | OASL:MTMR3 | OASL:STX6 | OASL:HIP1 |
| IFI44:IL6ST | OASL:PHF20 | EIF2AK2:SYPL1 | OASL:PIAS1 |
| OASL:BACH1 | OASL:PPARD | ISG15:ABLIM1 | OASL:PPP3R1 |
| OASL:KLF7 | OASL:PPP4R1 | OASL:FOXJ2 | OASL:RALB |
| OASL:PRMT2 | OASL:RBMS1 | OASL:IQSEC1 | OASL:RGS19 |
| OASL:HCK | OASL:RHOG | OASL:LRMP | OASL:TRIOBP |
| OASL:ITPKB | OASL:TIAM1 | OASL:NAB1 | EIF2AK2:PDE3B |
| OASL:MAP4K4 | USP18:IL16 | OASL:RAB31 | OASL:NCOA4 |
| OASL:PPM1F | OASL:CBX7 | OASL:WASF2 | OASL:RARA |
| OASL:RAB14 | OASL:RAF1 | OASL:ZNF274 | OASL:RPS6KA3 |
| IFI6:ABLIM1 | OASL:SERINC5 | OAS2:LEF1 | OASL:SIRPA |
| OAS2:FAIM3 | OASL:UBQLN2 | OASL:BRD1 | OASL:TLE3 |
| OASL:TNFRSF1A | USP18:CHMP7 | DHX58:IL16 | OASL:SLCO3A1 |
| DDX60:TGFBR2 | USP18:NECAP2 | ISG15:IL4R | OASL:ZDHHC17 |
| OASL:FLOT2 | OASL:CAP1 | OASL:BRD4 | USP18:FOXO1 |
| OASL:FNBP1 | OASL:HPS1 | OASL:CCNT2 | OASL:ASAP1 |
| OASL:MAP3K3 | OASL:IL1RAP | OASL:FGR | OASL:BAZ2B |
| OASL:STX10 | OASL:MEF2A | OASL:ITSN2 | OASL:FAM65B |
| OASL:ZDHHC18 | OASL:RNF19B | OASL:LYL1 | OASL:HHEX |
| OASL:ZNF143 | OASL:TMEM127 | OASL:PHF3 | OASL:MAX |
| TAP1:TGFBR2 | USP18:IL27RA | OASL:PSAP | OASL:PHF2 |
| OAS2:ABLIM1 | OASL:CDIPT | OASL:STX3 | OASL:RNF130 |
| OASL:ARRB2 | OASL:CREB1 | OASL:TNK2 | OASL:SOS2 |
| OASL:IKBKB | OASL:GPS2 | EIF2AK2:ZNF274 | OASL:STAM2 |
| OASL:KBTBD2 | OASL:NDE1 | OASL:ACAA1 | OASL:ZFC3H1 |
| OASL:PHC2 | OASL:RAB11FIP1 | OASL:CHD3 | IFI44:CYLD |
| OASL:PUM2 | USP18:ABLIM1 | OASL:FRY | IFIH1:CRLF3 |
| OASL:SSFA2 | EIF2AK2:TNRC6B | OASL:GRB2 | OASL:BANP |
| IFI44:MYC | OASL:FAM134A | OASL:MAP3K11 | OASL:CCND3 |
| OASL:ABHD2 | OASL:FCGRT | OASL:NEK7 | OASL:DGCR2 |
| OASL:CYLD | OASL:LPIN2 | OASL:PPP2R5A | OASL:USP15 |
| OASL:MAST3 | OASL:PECAM1 | USP18:ST13 | USP18:EIF3H |
| OASL:UBN1 | OASL:WBP2 | XAF1:LEF1 | OASL:LAT2 |
| IFI6:IL6ST | OASL:ZNF148 | OASL:CASP8 | OASL:ZYX |
| IFIH1:TGFBR2 | OASL:RTN3 | OASL:PCF11 | USP18:CAMK1D |
| OASL:CNPY3 | OASL:TYK2 | OASL:PRKCD | ZBP1:NDE1 |
| OASL:KIAA0232 | USP18:LTB | OASL:PSTPIP1 | |

[0058] In specific embodiments, a single VaSIRS derived biomarker combination (e.g., any one from TABLE B) is used for determining the indicator. In other embodiments, two VaSIRS derived biomarker combinations (e.g., any two from TABLE B) are used for determining the indicator. In still other embodiments, three VaSIRS derived biomarker combinations (e.g., any three from TABLE B) are used for determining the indicator. In still other embodiments, four VaSIRS derived biomarker combinations (e.g., any four from TABLE B) are used for determining the indicator.

[0059] In non-limiting examples of this type, the methods comprise: (a) determining a single VaSIRS derived biomarker value using a pair of VaSIRS biomarker values, the single VaSIRS derived biomarker value being indicative of a ratio of levels of first and second VaSIRS biomarkers; and (b) determining the indicator using the single derived VaSIRS biomarker value.

[0060] In other non-limiting examples of this type, the methods comprise: (a) determining a first VaSIRS derived biomarker value using a first pair of VaSIRS biomarker values, the first VaSIRS derived biomarker value being indicative of a ratio of levels of first and second VaSIRS biomarkers; (b) determining a second VaSIRS derived biomarker value using a second pair of VaSIRS biomarker values, the second VaSIRS derived biomarker value being indicative of a ratio of levels of third and fourth VaSIRS biomarkers; and (c) determining the indicator by combining the first and second derived VaSIRS biomarker values, using for example a combining function as disclosed herein.

[0061] In still other non-limiting examples of this type, the methods comprise: (a) determining a first VaSIRS derived biomarker value using a first pair of VaSIRS biomarker values, the first VaSIRS derived biomarker value being indicative of a ratio of levels of first and second VaSIRS biomarkers; (b) determining a second VaSIRS derived biomarker value using a second pair of VaSIRS biomarker values, the second VaSIRS derived biomarker value being indicative of a ratio of levels of third and fourth VaSIRS biomarkers; (c) determining a third VaSIRS derived biomarker value using a third pair of VaSIRS biomarker values, the third VaSIRS derived biomarker value being indicative of a ratio of levels of fifth and fourth VaSIRS biomarkers; and (d) determining the indicator by combining the first and sixth derived VaSIRS biomarker values, using for example a combining function as disclosed herein.

[0062] In certain embodiments, individual VaSIRS derived biomarker combinations are selected from ISG15:IL16, OASL:ADGRE5, TAP1:TGFBR2, IFIH1:CRLF3, IFI44:IL4R, EIF2AK2:SYPL1, OAS2:LEF1, STAT1:PCBP2 and IFI6:IL6ST. In preferred embodiments, individual VaSIRS derived biomarker combinations are selected from ISG15:IL16 and OASL:ADGRE5.

[0063] The virus associated with the VaSIRS is suitably selected from any one of Baltimore virus classification Groups I, II, III, IV, V, VI and VII, which is capable of inducing at least one of the clinical signs of SIRS.

[0064] Exemplary PaSIRS derived biomarker combinations are suitably selected from TABLE C.

TABLE C
PaSIRS Derived Biomarker

| | | | |
|---|---|---|---|
| RPL9:WARS | PREPL:WARS | SEH1L:WARS | EXOSC10:MYD88 |
| RPL9:CSTB | TCF4:LAP3 | EXOSC10:UBE2L6 | LY9:WARS |
| NUP160:WARS | ZBED5:WARS | TTC17:LAP3 | IMP3:CSTB |
| IMP3:ATOX1 | TCF4:POMP | SUCLG2:CEBPB | RPL15:CEBPB |
| RPS4X:WARS | NUP160:SQRDL | EXOSC10:G6PD | ARHGAP17:ATOX1 |
| TCF4:CEBPB | TRIT1:WARS | CEP192:WARS | TTC17:MYD88 |
| IMP3:LAP3 | ZBED5:CEBPB | NUP160:CD63 | EXOSC10:TCIRG1 |
| EXOSC10:WARS | IMP3:WARS | TMEM50B:WARS | ZMYND11:CEBPB |
| TTC17:WARS | RPS4X:SQRDL | EXOSC10:LDHA | CEP192:TANK |
| TCF4:WARS | NUP160:POMP | ARID1A:CSTB | IMP3:UBE2L6 |
| METAP1:WARS | EXOSC10:LAP3 | SUCLG2:WARS | RPS4X:CD63 |
| FNTA:POMP | RPS4X:GNG5 | ARID1A:CEBPB | RPL9:CD63 |
| TCF4:TANK | TOP2B:WARS | FBXO11:TANK | ARID1A:UBE2L6 |
| TOP2B:CEBPB | RPL9:POMP | SUCLG2:SH3GLB1 | TCF4:UBE2L6 |
| AHCTF1:CEBPB | EXOSC10:ATOX1 | TTC17:G6PD | ARID1A:WARS |
| RPS4X:MYD88 | TTC17:TANK | IMP3:PCMT1 | CAMK2G:G6PD |
| IMP3:CEBPB | EXOSC10:CEBPB | ARID1A:LAP3 | RPS4X:SH3GLB1 |
| RPL9:CEBPB | NOSIP:CEBPB | IMP3:SQRDL | RPL9:TANK |
| RPS4X:CEBPB | RPL22:CEBPB | TCF4:ATOX1 | IMP3:TANK |
| TTC17:CEBPB | TTC17:ATP2A2 | IMP3:SH3GLB1 | ZBED5:SH3GLB1 |
| TMEM50B:CEBPB | ZMYND11:CSTB | RPS4X:SERPINB1 | ZMYND11:SH3GLB1 |
| RPS4X:POMP | FNTA:SH3GLB1 | FBXO11:RALB | RPS14:CD63 |
| TOP2B:POMP | ARID1A:TAP1 | TMEM50B:SQRDL | CAMK2G:SQRDL |
| METAP1:POMP | NOSIP:WARS | CSNK1G2:CEBPB | ARIH2:CEBPB |
| EXOSC10:CSTB | RPS4X:UPP1 | RPL15:SH3GLB1 | ARID1A:NFIL3 |
| ZNF266:CEBPB | CNOT7:CEBPB | BCL11A:G6PD | IMP3:POMP |
| TTC17:ATOX1 | ARHGAP17:WARS | ZBED5:SQRDL | EXOSC10:ENO1 |
| CSNK1G2:G6PD | UFM1:WARS | ARID1A:SERPINB1 | PREPL:SH3GLB1 |
| SETX:CEBPB | PREPL:SQRDL | RPS14:SH3GLB1 | TTC17:BCL6 |
| ARHGAP17:CEBPB | IMP3:TAP1 | EXOSC10:TAP1 | ZMYND11:POMP |
| ZMYND11:WARS | ARID1A:PCMT1 | BCL11A:CEBPB | IMP3:RIT1 |
| IMP3:UPP1 | SUCLG2:SQRDL | ADSL:ATOX1 | CAMK2G:CD63 |
| EXOSC10:IRF1 | RPL22:SH3GLB1 | TCF4:FCER1G | IL10RA:CEBPB |
| UFM1:CEBPB | BCL11A:WARS | LY9:SH3GLB1 | FNTA:TCIRG1 |
| ARID1A:LDHA | CNOT7:WARS | IMP3:GNG5 | CAMK2G:TCIRG1 |
| RPL9:ATOX1 | ZBED5:TCIRG1 | SERTAD2:CEBPB | EXOSC10:PCMT1 |
| TTC17:GNG5 | EXOSC10:SQRDL | AHCTF1:MYD88 | RPS14:SQRDL |
| EXOSC10:POMP | AHCTF1:GNG5 | ARID1A:ENO1 | IMP3:PGD |
| ARID1A:ATOX1 | ZMYND11:FCER1G | EXOSC10:UPP1 | ZBED5:TNIP1 |
| RPL9:SH3GLB1 | TOP2B:ENO1 | CEP192:CSTB | CHN2:WARS |
| LY9:CEBPB | IMP3:IRF1 | LY9:SQRDL | IMP3:TCIRG1 |
| RPS14:WARS | CEP192:TAP1 | LY9:TNIP1 | AHCTF1:SQRDL |
| FNTA:SQRDL | RPL9:MYD88 | CNOT7:G6PD | CLIP4:WARS |
| APEX1:CD63 | RPL22:GNG5 | ARID1A:PLSCR1 | NOSIP:POMP |
| SETX:WARS | FNTA:MYD88 | CEP192:ATOX1 | RPL22:SQRDL |
| IMP3:TNIP1 | TCF4:GNG5 | IMP3:ENO1 | IMP3:VAMP3 |
| FNTA:CD63 | EXOSC10:TANK | ARID1A:IRF1 | TTC17:TIMP2 |
| TTC17:TCIRG1 | MLLT10:WARS | EXOSC10:GNG5 | TTC17:SQRDL |
| EXOSC10:SH3GLB1 | TTC17:POMP | LY9:ATOX1 | ARID1A:CD63 |
| RPS4X:FCER1G | TCF4:MYD88 | FBXO11:CEBPB | FNTA:LAP3 |
| RPS4X:PGD | IMP3:MYD88 | RPL9:SLAMF7 | BCL11A:LAP3 |
| CAMK2G:CEBPB | TOP2B:CD63 | RPL9:TNIP1 | IMP3:FCER1G |
| ZMYND11:G6PD | CEP192:RALB | PREPL:CD63 | CEP192:TNIP1 |
| FNTA:CEBPB | NUP160:PGD | ARHGAP17:SQRDL | ZMYND11:SQRDL |
| ZMYND11:CD63 | RPL9:SQRDL | ZBED5:POMP | ZMYND11:GNG5 |
| TCF4:RALB | CEP192:PCMT1 | RPS4X:TSPO | ARID1A:SLAMF7 |
| ARHGAP17:LAP3 | TCF4:SQRDL | IMP3:G6PD | ARID1A:TCIRG1 |
| IMP3:CD63 | RPL9:GNG5 | CEP192:POMP | ARID1A:TNIP1 |
| ZMYND11:C3AR1 | EXOSC10:CD63 | TMEM50B:CD63 | ZMYND11:PGD |
| AHCTF1:WARS | TCF4:SH3GLB1 | ZMYND11:ENO1 | CSNK1G2:TCIRG1 |
| RPS4X:ENO1 | ADSL:WARS | CEP192:LAP3 | TTC17:CD63 |
| CEP192:PLSCR1 | TTC17:SH3GLB1 | RPL9:UPP1 | NUP160:RTN4 |
| EXOSC9:POMP | ARID1A:SQRDL | TCF4:SERPINB1 | RPL15:SQRDL |
| FNTA:GNG5 | ARID1A:G6PD | AHCTF1:PLAUR | TTC17:UPP1 |
| CEP192:IRF1 | AHCTF1:TANK | RPL22:WARS | CAMK2G:FCER1G |
| CEP192:CEBPB | EXOSC2:CEBPB | EXOSC2:POMP | CEP192:TCIRG1 |
| IRF8:CEBPB | CNOT7:CSTB | AHCTF1:UPP1 | TTC17:SERPINB1 |
| CEP192:G6PD | ARID1A:PGD | IMP3:RALB | EXOSC2:UPP1 |
| FBXO11:UPP1 | ARID1A:STAT3 | ADK:SH3GLB1 | IMP3:TSPO |
| ARIH2:TCIRG1 | NOSIP:TCIRG1 | SUCLG2:CD63 | BCL11A:TNIP1 |
| PCID2:WARS | RPL9:FCER1G | FNTA:WARS | ADSL:ENO1 |
| CAMK2G:PGD | ARID1A:TRPC4AP | EXOSC10:TUBA1B | NOSIP:SQRDL |
| EXOSC10:FLII | ARID1A:SH3GLB1 | IMP3:PCBP1 | SERBP1:SH3GLB1 |
| RPL15:CD63 | CEP192:RAB27A | ARID1A:GRINA | ARID1A:NFKBIA |
| RPL22:CD63 | EXOSC10:FCER1G | TTC17:PGD | RPL9:ENO1 |
| CNOT7:SQRDL | SETX:SQRDL | ARID1A:TANK | ARID1A:RAB27A |
| FBXO11:SQRDL | CEP192:MYD88 | CSNK1G2:FLII | RPL15:WARS |
| TCF4:UPP1 | ARID1A:BCL6 | CEP192:STAT3 | BCL11A:CSTB |
| PCID2:CEBPB | EXOSC2:CD63 | AHCTF1:SH3GLB1 | |

[0065] In specific embodiments, a single PaSIRS derived biomarker combination (e.g., any one from TABLE C) is used for determining the indicator. In other embodiments, two PaSIRS derived biomarker combinations (e.g., any two from TABLE C) are used for determining the indicator. In still other embodiments, three PaSIRS derived biomarker combinations (e.g., any three from TABLE C) are used for determining the indicator. In still other embodiments, four PaSIRS derived biomarker combinations (e.g., any four from TABLE C) are used for determining the indicator.

[0066] In illustrative examples of this type, the methods comprise: (a) determining a single PaSIRS derived biomarker value using a pair of PaSIRS biomarker values, the single PaSIRS derived biomarker value being indicative of a ratio of levels of first and second PaSIRS biomarkers; and (b) determining the indicator using the single derived PaSIRS biomarker value.

[0067] In other illustrative examples of this type, the methods comprise: (a) determining a first PaSIRS derived biomarker value using a first pair of PaSIRS biomarker values, the first PaSIRS derived biomarker value being indicative of a ratio of levels of first and second PaSIRS biomarkers; (b) determining a second PaSIRS derived biomarker value using a second pair of PaSIRS biomarker values, the second PaSIRS derived biomarker value being indicative of a ratio of levels of third and fourth PaSIRS biomarkers; and (c) determining the indicator by combining the first and second derived PaSIRS biomarker values, using for example a combining function as disclosed herein.

[0068] In still other illustrative examples of this type, the methods comprise: (a) determining a first PaSIRS derived biomarker value using a first pair of PaSIRS biomarker values, the first PaSIRS derived biomarker value being indicative of a ratio of levels of first and second PaSIRS biomarkers; (b) determining a second PaSIRS derived biomarker value using a second pair of PaSIRS biomarker values, the second PaSIRS derived biomarker value being indicative of a ratio of levels of third and fourth PaSIRS biomarkers; (c) determining a third PaSIRS derived biomarker value using a third pair of PaSIRS biomarker values, the third PaSIRS derived biomarker value being indicative of a ratio of levels of fifth and fourth PaSIRS biomarkers; and (d) determining the indicator by combining the first and sixth derived PaSIRS biomarker values, using for example a combining function as disclosed herein.

[0069] In certain embodiments, individual PaSIRS derived biomarker combinations are suitably selected from TTC17:G6PD, HERC6:LAP3 and NUP160:TPP1.

[0070] The protozoan associated with the PaSIRS is suitably selected from any of the following protozoal genera, which are capable of inducing at least one of the clinical signs of SIRS; for example, Toxoplasma, Babesia, Plasmodium, Trypanosoma, Giardia, Entamoeba, Cryptosporidium, Balantidium and Leishmania.

[0071] Typical InSIRS derived biomarker combinations can be selected from TABLE D.

TABLE D
InSIRS Derived Biomarker

| | | | |
|---|---|---|---|
| TNFSF8:VEZT | TNFSF8:CDK6 | TNFSF8:SLC35A3 | TNFSF8:YEATS4 |
| TNFSF8:HEATR1 | TNFSF8:MANEA | ADAM19:TMEM87A | TNFSF8:CLUAP1 |
| TNFSF8:THOC2 | TNFSF8:CKAP2 | TNFSF8:LANCL1 | TNFSF8:LARP4 |
| TNFSF8:NIP7 | TNFSF8:ZNF507 | ADAM19:ERCC4 | TNFSF8:SLC35D1 |
| TNFSF8:MLLT10 | TNFSF8:GGPS1 | TNFSF8:CD28 | SYNE2:RBM26 |
| TNFSF8:EIF5B | TNFSF8:XPO4 | ADAM19:MLLT10 | TNFSF8:CD40LG |
| TNFSF8:LRRC8D | TNFSF8:PHC3 | TNFSF8:IQCB1 | VNN3:CYSLTR1 |
| TNFSF8:RNMT | TNFSF8:ASCC3 | TNFSF8:FASTKD2 | TNFSF8:SYT11 |
| STK17B:ARL6IP5 | TNFSF8:NOL10 | TNFSF8:RDX | TNFSF8:RIOK2 |
| ENTPD1:ARL6IP5 | TNFSF8:ANK3 | TNFSF8:MTO1 | TNFSF8:BZW2 |
| TNFSF8:CD84 | TNFSF8:SMC3 | IQSEC1:MACF1 | TNFSF8:LARP1 |
| TNFSF8:PWP1 | TNFSF8:REPS1 | TNFSF8:SMC6 | ADAM19:SYT11 |
| TNFSF8:IPO7 | TNFSF8:C14orf1 | TNFSF8:NEK1 | TNFSF8:NCBP1 |
| ADAM19:EXOC7 | TNFSF8:FUT8 | TNFSF8:ZNF562 | ADAM19:MACF1 |
| TNFSF8:ARHGAP5 | TNFSF8:VPS13A | TNFSF8:PEX1 | TNFSF8:NOL8 |
| TNFSF8:RMND1 | TNFSF8:RAD50 | ADAM19:SIDT2 | TNFSF8:KIAA0391 |
| TNFSF8:IDE | TNFSF8:ESF1 | TNFSF8:METTL5 | |
| TNFSF8:TBCE | TNFSF8:MRPS10 | CYP4F3:TRAPPC2 | |
| TNFSF8:G3BP1 | CDA:EFHD2 | TNFSF8:KRIT1 | |

[0072] In specific embodiments, a single InSIRS derived biomarker combination (e.g., any one from TABLE D) is used for determining the indicator. In other embodiments, two InSIRS derived biomarker combinations (e.g., any two from TABLE D) are used for determining the indicator. In still other embodiments, three InSIRS derived biomarker combinations (e.g., any three from TABLE D) are used for determining the indicator. In still other embodiments, four InSIRS derived biomarker combinations (e.g., any four from TABLE D) are used for determining the indicator.

[0073] In representative examples of this type, the methods comprise: (a) determining a single InSIRS derived biomarker value using a pair of InSIRS biomarker values, the single InSIRS derived biomarker value being indicative of a ratio of levels of first and second InSIRS biomarkers; and (b) determining the indicator using the single derived InSIRS biomarker value.

[0074] In other representative examples of this type, the methods comprise: (a) determining a first InSIRS derived biomarker value using a first pair of InSIRS biomarker values, the first InSIRS derived biomarker value being indicative of a ratio of levels of first and second InSIRS biomarkers; (b) determining a second InSIRS derived biomarker value using a second pair of InSIRS biomarker values, the second InSIRS derived biomarker value being indicative of a ratio of levels of third and fourth InSIRS biomarkers; and (c) determining the indicator by combining the first and second derived InSIRS biomarker values, using for example a combining function as disclosed herein.

[0075] In still other representative examples of this type, the methods comprise: (a) determining a first InSIRS derived biomarker value using a first pair of InSIRS biomarker values, the first InSIRS derived biomarker value being indicative of a ratio of levels of first and second InSIRS biomarkers; (b) determining a second InSIRS derived biomarker value using a second pair of InSIRS biomarker values, the second InSIRS derived biomarker value being indicative of a ratio of levels of third and fourth InSIRS biomarkers; (c) determining a third InSIRS derived biomarker value using a third pair of InSIRS biomarker values, the third InSIRS derived biomarker value being indicative of a ratio of levels of fifth and fourth InSIRS biomarkers; and (d) determining the indicator by combining the first and sixth derived InSIRS biomarker values, using for example a combining function as disclosed herein.

[0076] In certain embodiments, individual InSIRS derived biomarker combinations are suitably selected from ENTPD1:ARL6IP5, TNFSF8:HEATR1, ADAM19:POLR2A, SYNE2:VPS13C, TNFSF8:NIP7, CDA:EFHD2, ADAM19:MLLT10, PTGS1:ENTPD1, ADAM19:EXOC7 and CDA:PTGS1. In preferred embodiments, individual InSIRS derived biomarker combinations are suitably selected from ENTPD1:ARL6IP5 and TNFSF8:HEATR1.

[0077] Numerous non-infectious conditions are capable of inducing at least one of the clinical signs of SIRS, non-limiting examples of which include cancer, pancreatitis, surgery, embolism, aneurysm, autoimmune disease, sarcoidosis, trauma, asthma, allergic reaction, burn, haemorrhage, ischaemia/reperfusion, adverse drug response, stress, tissue damage/inflammation, foreign body response, obesity, coronary artery disease, anxiety, age.

[0078] Another aspect of the present invention provides apparatus for determining an indicator used in assessing a likelihood of a subject having a presence, absence or degree of BaSIRS or VaSIRS. This apparatus generally comprises at least one electronic processing device that:

[0079] determines a plurality of host response specific biomarker values including a plurality of BaSIRS biomarker values and a plurality of VaSIRS biomarker values, the plurality of BaSIRS biomarker values being indicative of values measured for a corresponding plurality of BaSIRS biomarkers in a sample taken from the subject, the plurality of VaSIRS biomarker values being indicative of values measured for a corresponding plurality of VaSIRS biomarkers in the sample;

[0080] determines a plurality of host response specific derived biomarker values including at least one BaSIRS derived biomarker value and at least one VaSIRS derived biomarker value, each derived BaSIRS biomarker value being determined using at least a subset of the plurality of BaSIRS biomarker values, and being indicative of a ratio of levels of a corresponding at least a subset of the plurality of BaSIRS biomarkers, and each derived VaSIRS biomarker value being determined using at least a subset of the plurality of VaSIRS biomarker values, and being indicative of a ratio of levels of a corresponding at least a subset of the plurality of VaSIRS biomarkers; and

[0081] determines the indicator using the plurality of host response specific derived biomarker values, wherein the at least a subset of BaSIRS biomarkers forms a BaSIRS derived biomarker combination which is not a derived biomarker combination for VaSIRS, PaSIRS or InSIRS, and wherein the at least a subset of VaSIRS biomarkers forms a VaSIRS derived biomarker combination which is not a derived biomarker combination for BaSIRS, PaSIRS or InSIRS.

[0082] In some embodiments, the at least one processing device:

[0083] (a) determines a plurality of pathogen specific biomarker values including at least one bacterial biomarker value and at least one viral biomarker value, the least one bacterial biomarker value being indicative of a value measured for a corresponding bacterial biomarker in the sample, the least one viral biomarker value being indicative of a value measured for a corresponding viral biomarker in the sample; and

[0084] (b) determines the indicator using the host response specific derived biomarker values in combination with the pathogen specific biomarker values.

[0085] In some embodiments, the plurality of host response specific biomarker values determined by the least one electronic processing device further include a plurality of PaSIRS biomarker values, the plurality of PaSIRS biomarker values being indicative of values measured for a corresponding plurality of PaSIRS biomarkers in the sample, and the plurality of host response specific derived biomarker values further includes at least one PaSIRS derived biomarker value, and the least one electronic processing device further:

[0086] determines each PaSIRS derived biomarker value using at least a subset of the plurality of PaSIRS biomarker values, the PaSIRS derived biomarker value being indicative of a ratio of levels of a corresponding at least a subset of the plurality of PaSIRS biomarkers; and

[0087] determines the indicator using the plurality of host response specific derived biomarker values, wherein the at least a subset of PaSIRS biomarkers forms a PaSIRS derived biomarker combination which is not a derived biomarker combination for BaSIRS, VaSIRS or InSIRS.

[0088] In some embodiments, the least one electronic processing device:

[0089] (a) determines a plurality of pathogen specific biomarker values including at least one bacterial biomarker value, at least one viral biomarker value and at least one protozoal biomarker value, the at least one bacterial biomarker value being indicative of a value measured for a corresponding bacterial biomarker in the sample, the least one viral biomarker value being indicative of a value measured for a corresponding viral biomarker in the sample, and the least one protozoal biomarker value being indicative of a value measured for a corresponding protozoal biomarker in the sample; and

[0090] (b) determines the indicator using the host response specific derived biomarker values in combination with the pathogen specific biomarker values.

[0091] In some embodiments, the plurality of host response specific biomarker values determined by the least one electronic processing device further include a plurality of InSIRS biomarker values, the plurality of InSIRS biomarker values being indicative of values measured for a corresponding plurality of InSIRS biomarkers in the sample, and the plurality of host response specific derived biomarker values further includes at least one InSIRS derived biomarker value, and the least one electronic processing device further:

[0092] determines each InSIRS derived biomarker value using at least a subset of the plurality of InSIRS biomarker values, the InSIRS derived biomarker value being indicative of a ratio of levels of a corresponding at least a subset of the plurality of InSIRS biomarkers; and

[0093] determines the indicator using the plurality of host response specific derived biomarker values, wherein the at least a subset of InSIRS biomarkers forms a InSIRS derived biomarker combination which is not a derived biomarker combination for BaSIRS, VaSIRS or PaSIRS.

[0094] In yet another aspect, the present invention provides compositions for determining an indicator used in assessing a likelihood of a subject having a presence, absence or degree of BaSIRS or VaSIRS. These compositions generally comprise, consist or consist essentially of: (1) a pair of BaSIRS biomarker cDNAs, and for each BaSIRS biomarker cDNA at least one oligonucleotide primer that hybridizes to the BaSIRS biomarker cDNA, and/or at least one oligonucleotide probe that hybridizes to the BaSIRS biomarker cDNA, wherein the at least one oligonucleotide primer and/or the at least one oligonucleotide probe comprises a heterologous label, and (2) a pair of VaSIRS biomarker cDNAs, and for each VaSIRS biomarker cDNA at least one oligonucleotide primer that hybridizes to the VaSIRS biomarker cDNA, and/or at least one oligonucleotide probe that hybridizes to the VaSIRS biomarker cDNA, wherein the at least one oligonucleotide primer and/or the at least one oligonucleotide probe comprises a heterologous label, wherein the pair of BaSIRS biomarker cDNAs forms a BaSIRS derived biomarker combination which is not a derived biomarker combination for VaSIRS, PaSIRS or InSIRS, wherein the pair of VaSIRS biomarker cDNAs forms a VaSIRS derived biomarker combination which is not a derived biomarker combination for BaSIRS, PaSIRS or InSIRS, wherein the BaSIRS derived biomarker combination is selected from the BaSIRS derived biomarker combinations set out in TABLE A, and wherein the VaSIRS derived biomarker combination is selected from the VaSIRS derived biomarker combinations set out in TABLE B.

[0095] In some embodiments, the compositions further comprise (a) a pair of PaSIRS biomarker cDNAs, and for each PaSIRS biomarker cDNA at least one oligonucleotide primer that hybridizes to the PaSIRS biomarker cDNA, and/or at least one oligonucleotide probe that hybridizes to the PaSIRS biomarker cDNA, wherein the at least one oligonucleotide primer and/or the at least one oligonucleotide probe comprises a heterologous label, wherein the pair of PaSIRS biomarker cDNAs forms a PaSIRS derived biomarker combination which is not a derived biomarker combination for BaSIRS, VaSIRS or InSIRS, and wherein the PaSIRS derived biomarker combination is selected from the PaSIRS derived biomarker combinations set out in TABLE C.

[0096] Alternatively, or in addition, the compositions may further comprise (b) a pair of InSIRS biomarker cDNAs, and for each InSIRS biomarker cDNA at least one oligonucleotide primer that hybridizes to the InSIRS biomarker cDNA, and/or at least one oligonucleotide probe that hybridizes to the InSIRS biomarker cDNA, wherein the at least one oligonucleotide primer and/or the at least one oligonucleotide probe comprises a heterologous label, wherein the pair of InSIRS biomarker cDNAs forms an InSIRS derived biomarker combination which is not a derived biomarker combination for BaSIRS, VaSIRS or PaSIRS, and wherein the InSIRS derived biomarker combination is selected from the InSIRS derived biomarker combinations set out in TABLE D.

[0097] Suitably, in any of the embodiments or aspects disclosed herein, the compositions further comprise a DNA polymerase. The DNA polymerase may be a thermostable DNA polymerase.

[0098] In any of the embodiments or aspects disclosed herein, the compositions suitably comprise for each cDNA a pair of forward and reverse oligonucleotide primers that hybridize to opposite complementary strands of the cDNA and that permit nucleic acid amplification of at least a portion of the cDNA to produce an amplicon. In representative examples of these embodiments, the compositions may further comprise for each cDNA an oligonucleotide probe that comprises a heterologous label and hybridizes to the amplicon.

[0099] In certain embodiments, the components of an individual composition are comprised in a mixture.

[0100] Suitably, the compositions comprise a population of cDNAs corresponding to mRNA derived from a cell or cell population from a patient sample. In preferred embodiments, the population of cDNAs represents whole leukocyte cDNA (e.g., whole peripheral blood leukocyte cDNA) with a cDNA expression profile characteristic of a subject with a SIRS condition selected from BaSIRS, VaSIRS, PaSIRS and InSIRS, wherein the cDNA expression profile comprises at least one pair of biomarkers (e.g., 1, 2, 3, 4, 5, 6, 7, 8, 9, 10, 11, 12, 13, 14, 15, 16, 17, 18, 19, 20, 30, 40, 50 or more pairs of biomarkers), wherein a respective pair of biomarkers comprises a first biomarker and a second biomarker, wherein the first biomarker is expressed at a higher level in leukocytes (e.g., whole peripheral blood leukocytes) from a subject with the SIRS condition than in leukocytes (e.g., whole peripheral blood leukocytes) from a healthy subject or from a subject without the SIRS condition (e.g., the first biomarker is expressed in leukocytes from a subject with the SIRS condition at a level that is at least 110%, 120%, 130%, 140%, 150%, 160%, 170%, 180%, 190%, 200%, 250%, 300%, 350%, 400%, 450%, 500%, 600%, 700%, 800%, 900%, 1000%, 2000%, 3000%, 4000%, or 5000% of the level of the first biomarker in leukocytes from a healthy subject or from a subject without the SIRS condition), wherein the second biomarker is expressed at about the same or at a lower level in leukocytes (e.g., whole peripheral blood leukocytes) from a subject with the SIRS condition than in leukocytes (e.g., whole peripheral blood leukocytes) from a healthy subject or from a subject without the SIRS condition (e.g., the second biomarker is expressed in leukocytes from a subject with the SIRS condition at a level that is no more than 105%, 104%, 103%, 102%, 100%, 99%, 98%, 97%, 96%, 95%, 90%, 85%, 80%, 75%, 70%, 65%, 60%, 55%, 50%, 45%, 40%, 35%, 30%, 25%, 20%, 15%, 10%, 5%, 1%, 0.5%, 0.1%, 0.05%, 0.01%, 0.005%, 0.001% of the level of the second biomarker in leukocytes from a healthy subject or from a subject without the SIRS condition) and wherein the first biomarker is a first mentioned or ‘numerator’ biomarker of a respective pair of biomarkers in any one of TABLES A, B, C or D, and the second biomarker represents a second mentioned or ‘denominator’ biomarker of the respective pair of biomarkers.

[0101] In some embodiments, the sample is a body fluid, including blood, urine, plasma, serum, urine, secretion or excretion. In some embodiments, the cell population is from blood, suitably peripheral blood. In specific embodiments, the sample comprises blood, suitably peripheral blood. Suitably, the cell or cell population is a cell or cell population of the immune system, suitably a leukocyte or leukocyte population.

[0102] Suitably, in any of the embodiments or aspects disclosed herein, the compositions may further comprise a pathogen nucleic acid and at least one oligonucleotide primer that hybridizes to the pathogen nucleic acid, and/or at least one oligonucleotide probe that hybridizes to the pathogen nucleic acid, wherein the at least one oligonucleotide primer and/or the at least one oligonucleotide probe comprises a heterologous label. Suitably the pathogen from which the pathogen nucleic acid is selected is from a bacterium, a virus and a protozoan. The pathogen nucleic acid is suitably derived from a patient sample, suitably a body fluid, illustrative examples of which include blood, urine, plasma, serum, urine, secretion or excretion. In specific embodiments, the sample comprises blood, suitably peripheral blood.

[0103] Still another aspect of the present invention provides kits for determining an indicator used in assessing a likelihood of a subject having a presence, absence or degree of BaSIRS or VaSIRS. The kits generally comprise, consist or consist essentially of: (1) for each of a pair of BaSIRS biomarker cDNAs at least one oligonucleotide primer and/or at least one oligonucleotide probe that hybridizes to the BaSIRS biomarker cDNA, wherein the at least one oligonucleotide primer and/or the at least one oligonucleotide probe comprises a heterologous label; and (2) for each of a pair of VaSIRS biomarker cDNA at least one oligonucleotide primer and/or at least one oligonucleotide probe that hybridizes to the VaSIRS biomarker cDNA, wherein the at least one oligonucleotide primer and/or the at least one oligonucleotide probe comprise(s) a heterologous label, wherein the pair of BaSIRS biomarker cDNAs forms a BaSIRS derived biomarker combination which is not a derived biomarker combination for VaSIRS, PaSIRS or InSIRS, wherein the pair of VaSIRS biomarker cDNAs forms a VaSIRS derived biomarker combination which is not a derived biomarker combination for BaSIRS, PaSIRS or InSIRS, wherein the BaSIRS derived biomarker combination is selected from the BaSIRS derived biomarker combinations set out in TABLE A, and wherein the VaSIRS derived biomarker combination is selected from the VaSIRS derived biomarker combinations set out in TABLE B.

[0104] In some embodiments, the kits further comprise (a) for each of a pair of PaSIRS biomarker cDNAs at least one oligonucleotide primer and/or at least one oligonucleotide probe that hybridizes to the PaSIRS biomarker cDNA, wherein the at least one oligonucleotide primer and/or the at least one oligonucleotide probe comprises a heterologous label, wherein the at least one oligonucleotide primer and/or the at least one oligonucleotide probe comprises a heterologous label, wherein the pair of PaSIRS biomarker cDNAs forms a PaSIRS derived biomarker combination which is not a derived biomarker combination for BaSIRS, VaSIRS or InSIRS, and wherein the PaSIRS derived biomarker combination is selected from the PaSIRS derived biomarker combinations set out in TABLE C.

[0105] Alternatively, or in addition, the kits may further comprise (b) for each of a pair of InSIRS biomarker cDNAs at least one oligonucleotide primer and/or at least one oligonucleotide probe that hybridizes to the InSIRS biomarker cDNA, wherein the at least one oligonucleotide primer and/or the at least one oligonucleotide probe comprises a heterologous label, wherein the pair of InSIRS biomarker cDNAs forms an InSIRS derived biomarker combination which is not a derived biomarker combination for BaSIRS, VaSIRS or PaSIRS, and wherein the InSIRS derived biomarker combination is selected from the InSIRS derived biomarker combinations set out in TABLE D.

[0106] Suitably, in any of the embodiments or aspects disclosed herein, the kits may further comprise at least one oligonucleotide primer that hybridizes to a pathogen nucleic acid, and/or at least one oligonucleotide probe that hybridizes to the pathogen nucleic acid, wherein the at least one oligonucleotide primer and/or the at least one oligonucleotide probe comprises a heterologous label.

[0107] In any of the embodiments or aspects disclosed herein, the kits may further comprise a DNA polymerase. Suitably, the DNA polymerase is a thermostable DNA polymerase.

[0108] In any of the embodiments or aspects disclosed herein, the kits suitably comprise for each cDNA a pair of forward and reverse oligonucleotide primers that permit nucleic acid amplification of at least a portion of the cDNA to produce an amplicon. In representative examples of these embodiments, the kits may further comprise for each cDNA an oligonucleotide probe that comprises a heterologous label and hybridizes to the amplicon.

[0109] In specific embodiments, the components of the kits when used to determine the indicator are combined to form a mixture.

[0110] The kits may further comprise one or more reagents for preparing mRNA from a cell or cell population from a patient sample (e.g., a body fluid such as blood, urine, plasma, serum, urine, secretion or excretion). In representative examples of this type, the kits comprise a reagent for preparing cDNA from the mRNA.

[0111] In a further aspect, the present invention provides methods for treating a subject with a SIRS condition selected from BaSIRS and VaSIRS and optionally one of PaSIRS or InSIRS. These methods generally comprise, consist or consist essentially of: exposing the subject to a treatment regimen for treating the SIRS condition based on an indicator obtained from an indicator-determining method, wherein the indicator is indicative of the presence, absence or degree of the SIRS condition in the subject, and wherein the indicator-determining method is as broadly described above and elsewhere herein. In some embodiments, the methods further comprise taking a sample from the subject and determining an indicator indicative of the likelihood of the presence, absence or degree of the SIRS condition using the indicator-determining method. In other embodiments, the methods further comprise sending a sample taken from the subject to a laboratory at which the indicator is determined according to the indicator-determining method. In these embodiments, the methods suitably further comprise receiving the indicator from the laboratory.

[0112] In a related aspect, the present invention provides methods for managing a subject with a specific SIRS condition selected from BaSIRS and VaSIRS and optionally one of PaSIRS or InSIRS. These methods generally comprise, consist or consist essentially of: exposing the subject to a treatment regimen for the specific SIRS condition and avoiding exposing the subject to a treatment regimen for a SIRS condition other than the specific SIRS condition, based on an indicator obtained from an indicator-determining method, wherein the indicator is indicative of the presence, absence or degree of the SIRS condition in the subject, and wherein the indicator-determining method is an indicator-determining method as broadly described above and elsewhere herein. In some embodiments, the methods further comprise taking a sample from the subject and determining an indicator indicative of the likelihood of the presence, absence or degree of BaSIRS, VaSIRS, PaSIRS, or InSIRS using the indicator-determining method. In other embodiments, the methods further comprise sending a sample taken from the subject to a laboratory at which the indicator is determined according to the indicator-determining method. In these embodiments, the methods suitably further comprise receiving the indicator from the laboratory.

[0113] In a further aspect, the present invention provides methods of monitoring the efficacy of a treatment regimen in a subject with a SIRS condition selected from BaSIRS and VaSIRS and optionally one of PaSIRS or InSIRS, wherein the treatment regimen is monitored for efficacy towards a desired health state (e.g., absence of the SIRS condition). These methods generally comprise, consist or consist essentially of: (1) obtaining a biomarker profile of a sample taken from the subject after treatment of the subject with the treatment regimen, wherein the sample biomarker profile comprises (a) for each of a plurality of derived biomarkers as broadly defined above and elsewhere herein a plurality of host response specific derived biomarker values, and optionally (b) if the SIRS condition is an infection positive SIRS condition (“IpSIRS”), a pathogen specific biomarker value as broadly defined above and elsewhere herein for a pathogen biomarker associated with the SIRS condition; and (2) comparing the sample biomarker profile to a reference biomarker profile that is correlated with a presence, absence or degree of the SIRS condition to thereby determine whether the treatment regimen is effective for changing the health status of the subject to the desired health state.

[0114] In a related aspect, the present invention provides methods of monitoring the efficacy of a treatment regimen in a subject towards a desired health state (e.g., absence of BaSIRS, VaSIRS, PaSIRS, or InSIRS). These methods generally comprise, consist or consist essentially of: (1) determining an indicator according to an indicator-determining method as broadly described above and elsewhere herein based on a sample taken from the subject after treatment of the subject with the treatment regimen; and (2) assessing the likelihood of the subject having a presence, absence or degree of a SIRS condition selected from BaSIRS and VaSIRS and optionally one of PaSIRS or InSIRS using the indicator to thereby determine whether the treatment regimen is effective for changing the health status of the subject to the desired health state. In some embodiments, the indicator is determined using a plurality of host response specific derived biomarker values. In other embodiments, the indicator is determined using a plurality of host response specific derived biomarker values and a plurality of pathogen specific biomarker values.

[0115] Another aspect of the present invention provides methods of correlating a biomarker profile with an effective treatment regimen for a SIRS condition selected from BaSIRS and VaSIRS and optionally one of PaSIRS or InSIRS. These methods generally comprise, consist or consist essentially of: (1) determining a biomarker profile of a sample taken from a subject with the SIRS condition and for whom an effective treatment has been identified, wherein the biomarker profile comprises: (a) for each of a plurality of derived biomarkers as broadly defined above and elsewhere herein a plurality of host response specific derived biomarker values, and optionally (b) if the SIRS condition is an IpSIRS, a pathogen specific biomarker value as broadly defined above and elsewhere herein for a pathogen biomarker associated with the SIRS condition; and (2) correlating the biomarker profile so determined with an effective treatment regimen for the SIRS condition.

[0116] In yet another aspect, the present invention provides methods of determining whether a treatment regimen is effective for treating a subject with a SIRS condition selected from BaSIRS and VaSIRS and optionally one of PaSIRS or InSIRS. These methods generally comprise, consist or consist essentially of: (1) determining a post-treatment biomarker profile of a sample taken from the subject after treatment with a treatment regimen, wherein the biomarker profile comprises: (a) for each of a plurality of derived biomarkers as broadly defined above and elsewhere herein a plurality of host response specific derived biomarker values, and optionally (b) if the SIRS condition is an IpSIRS, a pathogen specific biomarker value as broadly defined above and elsewhere herein for a pathogen biomarker associated with the SIRS condition; and (2) determining a post-treatment indicator using the post-treatment biomarker profile, wherein the post-treatment indicator is at least partially indicative of the presence, absence or degree of the SIRS condition, wherein the post-treatment indicator indicates whether the treatment regimen is effective for treating the SIRS condition in the subject on the basis that post-treatment indicator indicates the presence of a healthy condition or the presence of the SIRS condition of a lower degree relative to the degree of the SIRS condition in the subject before treatment with the treatment regimen.

[0117] A further aspect of the present invention provides methods of correlating a biomarker profile with a positive or negative response to a treatment regimen for treating a SIRS condition selected from BaSIRS and VaSIRS and optionally one of PaSIRS or InSIRS. These methods generally comprise, consist or consist essentially of: (1) determining a biomarker profile of a sample taken from a subject with the SIRS condition following commencement of the treatment regimen, wherein the reference biomarker profile comprises: (a) for each of a plurality of derived biomarkers as broadly defined above and elsewhere herein a plurality of host response specific derived biomarker values, and optionally (b) if the SIRS condition is an IpSIRS, a pathogen specific biomarker value as broadly defined above and elsewhere herein for a pathogen biomarker associated with the SIRS condition; and (2) correlating the sample biomarker profile with a positive or negative response to the treatment regimen.

[0118] Another aspect of the present invention provides methods of determining a positive or negative response to a treatment regimen by a subject with a SIRS condition selected from BaSIRS and VaSIRS and optionally one of PaSIRS or InSIRS. These methods generally comprise, consist or consist essentially of: (1) correlating a reference biomarker profile with a positive or negative response to the treatment regimen, wherein the biomarker profile comprises: (a) for each of a plurality of derived biomarkers as broadly defined above and elsewhere herein a plurality of host response specific derived biomarker values, and optionally (b) if the SIRS condition is an IpSIRS, a pathogen specific biomarker value as broadly defined above and elsewhere herein for a pathogen biomarker associated with the SIRS condition; (2) detecting a biomarker profile of a sample taken from the subject, wherein the sample biomarker profile comprises (i) a plurality of host response specific derived biomarker values for each of the plurality of derived biomarkers in the reference biomarker profile, and optionally (ii) a pathogen specific biomarker value for the pathogen biomarker in the reference biomarker profile, wherein the sample biomarker profile indicates whether the subject is responding positively or negatively to the treatment regimen.

[0119] Still another aspect of the present invention provides methods of determining a positive or negative response to a treatment regimen by a subject with a SIRS condition selected from BaSIRS and VaSIRS and optionally one of PaSIRS or InSIRS. These methods generally comprise, consist or consist essentially of: (1) obtaining a biomarker profile of a sample taken from the subject following commencement of the treatment regimen, wherein the biomarker profile comprises: (a) for each of a plurality of derived biomarkers as broadly defined above and elsewhere herein a plurality of host response specific derived biomarker values, and optionally (b) if the SIRS condition is an IpSIRS, a pathogen specific biomarker value as broadly defined above and elsewhere herein for a pathogen biomarker associated with the SIRS condition, wherein the sample biomarker profile is correlated with a positive or negative response to the treatment regimen; and (2) and determining whether the subject is responding positively or negatively to the treatment regimen.

[0120] Yet other aspects of the present invention contemplate the use of the indicator-determining methods as broadly described above and elsewhere herein in methods for correlating a biomarker profile with an effective treatment regimen for a SIRS condition selected from BaSIRS and VaSIRS and optionally one of PaSIRS or InSIRS, or for determining whether a treatment regimen is effective for treating a subject with the SIRS condition, or for correlating a biomarker profile with a positive or negative response to a treatment regimen, or for determining a positive or negative response to a treatment regimen by a subject with the SIRS condition.

### BRIEF DESCRIPTION OF THE DRAWINGS

[0121] FIG. 1: Plot of the performance (AUC) of the best BaSIRS derived biomarkers following a greedy search. The best derived biomarker identified was TSPO:HCLS1 with an AUC of 0.84. The addition of further derived biomarkers adds incrementally to the overall AUC. The addition of further derived biomarkers beyond the first two was considered to add noise and difficulty in translating to a commercial format.

[0122] FIG. 2: Performance (AUC) of the final BaSIRS signature, represented as bar graphs, in the various datasets used, including in the “discovery” (training), “validation” and “control” datasets. The signature was developed to provide strong AUC in BaSIRS datasets and weak AUC in datasets containing samples derived from subjects with SIRS unrelated to bacterial infection.

[0123] FIG. 3: Performance of the final BaSIRS signature (OPLAH:ZHX2 and TSPO:HCLS1), represented as box and whisker plots, in the discovery datasets. Good separation in all datasets can be seen between Control (non-BaSIRS) and Case (BaSIRS) subjects.

[0124] FIG. 4: Performance of the final BaSIRS signature (OPLAH:ZHX2 and TSPO:HCLS1) represented as box and whisker plots, in the validation datasets. Good separation in all datasets can be seen between Control (non-BaSIRS) and Case (BaSIRS) subjects.

[0125] FIG. 5: Performance of the final BaSIRS signature (OPLAH:ZHX2 and TSPO:HCLS1) represented as box and whisker plots, in the control datasets. Poor separation in all datasets can be seen between Control (healthy or SIRS other than BaSIRS) and Case (SIRS other than BaSIRS) subjects.

[0126] FIG. 6: Plot of the performance (AUC) of the best VaSIRS derived biomarkers following a greedy search. The best derived biomarker identified was ISG15:IL16 with an AUC of 0.92. The addition of further derived biomarkers adds incrementally to the overall AUC. The addition of further derived biomarkers beyond the first two was considered to add noise and difficulty in translating to a commercial format.

[0127] FIG. 7: Box and whisker plots demonstrating performance (AUC=0.962) of the final VaSIRS signature (ISG15:IL16 and OASL:ADGRE5 in the right hand plot) in pediatric patients in intensive care with systemic inflammation. This figure shows the performance of the components of the pan-viral signature, and in combination (ISG15:IL16 and OASL:ADGRE5), in three pediatric patient cohorts from a study consisting of 12 sterile systemic inflammation (InSIRS, “control”), 28 bacterial systemic inflammation (“sepsis”), 6 viral systemic inflammation (“viral”). The study was called GAPPSS. ADGRE5 is also called CD97.

[0128] FIG. 8: Box and whisker plots showing the performance of the final VaSIRS signature (ISG15:IL16 and OASL:ADGRE5) for 624 patients admitted to intensive care with suspected sepsis (MARS clinical trial). Patients are grouped based on retrospective physician diagnosis and whether a pathogenic organism was isolated (bacteria, mixed condition, virus) or not (healthy, SIRS). Good separation of those patients retrospectively diagnosed with a viral condition, and for which a virus was isolated, can be seen when using the final VaSIRS signature in this large patient cohort.

[0129] FIG. 9: Box and whisker plots showing the performance of the final VaSIRS signature (ISG15:IL16 and OASL:ADGRE5) for patients presenting to a clinic with acute clinical signs associated with Human Immunodeficiency Virus (HIV) (GSE29429). Comparison was made between two groups of subjects, including 17 healthy controls and 30 patients infected with HIV. The Area Under Curve (AUC) was 0.91.

[0130] FIG. 10: Box and whisker plots using the final VaSIRS signature in a time course study in a limited number of piglets deliberately infected (Day 0) with porcine circovirus and followed for 29 days. Blood samples were taken prior to inoculation (Day 0) and on Days 7, 14, 21 and 29 (GSE14790). The alternate and correlated biomarker N4BP1 was substituted for OASL because this latter biomarker is not found in pigs. Areas Under Curve (AUCs) were 0.812, 1.00, 1.00 and 1.00 for Days 0 vs 7, 0 vs 14, 0 vs 21 and 0 vs 29, respectively.

[0131] FIG. 11: Use of the final VaSIRS signature in children with acute mild (n=9), moderate (n=9) or severe (n=8) Respiratory Syncytial Virus (RSV) infection, and upon 4-6 weeks of recovery for those children that had acute moderate and severe infection shows good separation between those with acute infection versus those in recovery. Little difference was found between patients with RSV infection of varying severity.

[0132] FIG. 12: Time course study of the use of the final VaSIRS signature in cynomologus macaques (n=15) infected with aerosolized Marburg virus (Filoviridae, Group V). In this study 15 Marburg virus-infected macaques (1000 pfu) were studied over a nine-day period with three animals sacrificed at each two-day interval. Cytokine and gene expression analyzes revealed similar peaks by Day 7 to that of SeptiCyte VIRUS score. The first major elevation in VaSIRS signature can be seen on Day 3 post-exposure which correlates to the first detectable presence of viral antigen in regional lymph nodes and precedes first detectable viremia (Day 4) and elevated body temperature (Day 5). (original study published by Lin, K. L., Twenhafel, N. A., Connor, J. H., Cashman, K. A., Shamblin, J. D., Donnelly, G. C., et al. (2015). Temporal Characterization of Marburg Virus Angola Infection following Aerosol Challenge in Rhesus Macaques. Journal of Virology, 89(19), 9875-9885.)

[0133] FIG. 13: Use of VaSIRS signature over time using liver biopsies from chimpanzees intravenously inoculated (Week 0) with either Hepatitis C Virus (HCV, n=3) or Hepatitis E Virus (HEV, n=4). Samples were grouped based on the independent detection of viremia, including; first positive week (and the second positive week for HCV), the peak positive week, the last positive week, the first negative week and the fourth negative week. The temporal gene expression responses for each virus (each Baltimore Group IV viruses) is different. The VaSIRS signature using liver tissue largely reflected viremia detected in plasma using virus-specific RT-PCR assays, the peak of which preceded both the antibody response and peak liver histological activity index (HAI, Ishtak activity) by 1-4 weeks for both viruses. (original study published by Yu, C., Boon, D., McDonald, S. L., Myers, T. G., Tomioka, K., Nguyen, H., et al. (2010). Pathogenesis of Hepatitis E Virus and Hepatitis C Virus in Chimpanzees: Similarities and Differences. Journal of Virology, 84(21), 11264-11278.)

[0134] FIG. 14: Plot of the performance (AUC) of the best PaSIRS derived biomarkers following a greedy search. The performance of these same derived biomarkers is also shown in a merged control dataset (lower line). The best derived biomarker identified was TTC17:G6PD with an AUC of 0.96. The addition of further derived biomarkers adds incrementally to the overall AUC. The addition of further derived biomarkers beyond the first three was considered to add noise and difficulty in translating to a commercial format.

[0135] FIG. 15: Box and whisker plots of the performance of the combination of the derived biomarkers TTC17/G6PD, HERC6/LAP3 and NUP160/TPP1 for sixteen non-protozoal datasets (top two rows) and four protozoal datasets. The overall AUC across these datasets for this single derived biomarker was 0.99.

[0136] FIG. 16: Box and whisker plots of the performance of the derived biomarkers TTC17/G6PD and HERC6/LAP3 and NUP160/TPP1 for Clinical (protozoal) and Control (non-protozoal) datasets. The Clinical dataset consists of five merged datasets (GSE34404, 64610, 33811, 15221 and 5418), and the Control dataset consists of 16 merged datasets, including four viral (GSE40366, 41752, 51808, 52428), eight SIRS (GSE19301, 38485, 46743, 64813, 17755, 47655, 29532, 61672), three Triage (GSE11908, 33341, 25504) and one healthy (GSE35846). Each merged dataset contains those subjects (or patients) with the condition under study (Case) and those subjects without the condition (Control). Good separation can be observed between the Case and Control in the Clinical (protozoal) dataset whilst there is poor separation between Case and Control in the Control dataset. Such performance indicates specificity of the derived biomarkers.

[0137] FIG. 17: Box and whisker plots demonstrating the performance of the final PaSIRS signature TTC17/G6PD, HERC6/LAP3 and NUP160/TPP1 in the dataset GSE43661. Macrophages from three donors were cultured and either infected with Leishmania major (Case) or mock infected (Control). Samples were taken at time point 0 and at 3, 6, 12 and 24 hours. The value of the derived biomarkers changes over time in both infected and mock-infected samples and the largest difference between these two cohorts can be seen at time points 3 and 6 hours post-infection.

[0138] FIG. 18: Box and whisker plot showing the performance of the final PaSIRS signature TTC17/G6PD, HERC6/LAP3 and NUP160/TPP1 in the dataset GSE23750. Intestinal biopsies were taken from eight patients with Entamoeba histolytica infection on Day 1 and on Day 60 following treatment. A difference between the two time points can be observed but it is not large, perhaps because the sample was an intestinal biopsy rather than peripheral blood.

[0139] FIG. 19: Box and whisker plot showing the performance of the final PaSIRS signature TTC17/G6PD, HERC6/LAP3 and NUP160/TPP1 in dataset GSE7047. Cultured (in vitro) HeLa cells were either infected or not with Trypanosoma cruzi. Three replicates were performed. A large difference can be observed in the value obtained for this combination of derived biomarkers between infected and uninfected HeLa cells.

[0140] FIG. 20: Box and whisker plot showing the performance of the final PaSIRS signature TTC17/G6PD, HERC6/LAP3 and NUP160/TPP1 in dataset GSE50957. Five people on malaria prophylaxis were infected with Plasmodium falciparum through the bites of infected mosquitos and blood samples were taken pre- and post-infection. Blood samples from two healthy controls were also included in the study. Despite the subjects being on malaria prophylaxis a large difference can be observed between samples taken pre- and post-infection.

[0141] FIG. 21: Box and whisker plot showing the performance of the final PaSIRS signature TTC17/G6PD, HERC6/LAP3 and NUP160/TPP1 in dataset GSE52166 which is a larger study of the same design as GSE50957 but involving more patients (n=54, samples taken pre- and post-infection). Despite the subjects being on malaria prophylaxis a difference, albeit less dramatic than for GSE50957, can be observed between samples taken pre- and post-infection.

[0142] FIG. 22: Plot of the performance (AUC) of the best inSIRS derived biomarkers following a greedy search. The best derived biomarker identified was ENTPD1:ARL6IP5 with an AUC of 0.898. The addition of further derived biomarkers adds incrementally to the overall AUC. The addition of further derived biomarkers beyond the first two was considered to add noise and difficulty in translating to a commercial format.

[0143] FIG. 23: Box and whisker plots showing the performance of the inSIRS signature (ENTPD1/ARL6IP5; TNFSF8/HEATR1) using controls datasets (infectious SIRS; GSE datasets 11909 (mixed conditions including autoimmunity vs infection positive), 19301 (asthma exacerbation vs quiescent), 38485 (schizophrenia vs healthy), 41752 (Lassa virus infection vs healthy), 42834 (tuberculosis vs healthy), 51808 (Dengue virus infection vs healthy), 52428 (influenza virus infection vs healthy), 61672 (anxiety vs not) and 64813 (post-traumatic stress syndrome vs pre-stress).

[0144] FIG. 24: Box and whisker plots showing the performance of the inSIRS signature (ENTPD1/ARL6IP5; TNFSF8/HEATR1) using discovery datasets, including GAPPSS (sepsis and surgical SIRS in children), GSE17755 (autoimmune disease vs infected), GSE36809 (trauma with and without sepsis), GSE47655 (anaphylaxis), GSE63990 (acute respiratory infection) and 74224 (sepsis and SIRS in adults).

[0145] FIG. 25: Box and whisker plots showing the performance of the inSIRS signature (ENTPD1/ARL6IP5; TNFSF8/HEATR1) using a separate set of samples (validation) from the datasets, including GAPPSS (sepsis and surgical SIRS in children), GSE17755 (autoimmune disease vs infected), GSE36809 (trauma, with or without sepsis), GSE47655 (anaphylaxis), GSE63990 (acute respiratory infection) and 74224 (sepsis and SIRS in adults).

[0146] FIG. 26: Multi-dimensional scaling plot using random forest and BaSIRS and VaSIRS derived biomarkers on data associated with GSE63990. Good separation of patients with acute respiratory inflammation into those patients with bacterial and viral infections and non-infectious illness can be observed when using BaSIRS and VaSIRS derived biomarkers. It can be seen that some patients with acute respiratory inflammation due to a bacterial infection (as diagnosed by a clinician) cluster with those patients with a viral infection (as determined using multi-dimensional scaling) and vice versa.

[0147] FIG. 27: Example patient report for the host response specific biomarkers for a bacterial infection (alone)—called SeptiCyte MICROBE.

[0148] FIG. 28: Example patient report for the host response specific biomarkers for a viral infection (alone)—called SeptiCyte VIRUS.

[0149] FIG. 29: Example patient report for the host response specific biomarkers for a protozoal infection (alone)—called SeptiCyte PROTOZOAN.

[0150] FIG. 30: Example patient report for the host response specific biomarkers for bacterial, viral, protozoal and infection negative systemic inflammation combined—called SeptiCyte SPECTRUM. In this instance the patient has a predominant bacterial host response.

[0151] FIG. 31: Example patient report for the host response specific biomarkers for bacterial, viral, protozoal and infection negative systemic inflammation combined—called SeptiCyte SPECTRUM. In this instance the patient has a predominant viral host response.

[0152] FIG. 32: Example patient report for the host response specific biomarkers for bacterial, viral, protozoal and infection negative systemic inflammation combined—called SeptiCyte SPECTRUM. In this instance the patient has a predominant protozoal host response.

[0153] FIG. 33: Example patient report for the host response specific biomarkers for bacterial, viral, protozoal and infection negative systemic inflammation combined—called SeptiCyte SPECTRUM. In this instance the patient has a predominant non-infectious host response.

[0154] FIG. 34: Plot of BaSIRS signature results (Y axis, host response) versus bacterial pathogen detection results (X axis, pathogen molecule) for intensive care patients with retrospectively diagnosed “sepsis” (ipSIRS), “SIRS” (InSIRS) or “indeterminate” (three clinicians could not decide on a diagnosis). The Y axis is designated as “SeptiScore”, which is a probability of BaSIRS, and the X axis is in RT-PCR cycle time (Ct), which is a measurement of bacterial DNA in whole blood. Each dot represents a patient blood sample that has been tested and those that are circled (on the right hand side) are the only samples that were found to be blood culture positive. Such samples also have low Ct values, indicating that bacterial DNA could be detected at high levels, and high SeptiScores, indicating a strong specific host response to bacterial infection.

[0155] FIG. 35: Plot of VaSIRS signature and viral pathogen results for intensive care patients included in the MARS study. Those patients that were viral pathogen positive are circled (with varying sized circles for different virus types). In particular, those patients positive for influenza and RSV virus antigens are also strongly positive for VaSIRS signature.

[0156] FIG. 36. A plot of scores obtained for SeptiCyte™ VIRUS and SeptiCyte™ MICROBE for pediatric patients participating in a clinical trial that presented with clinical signs of SIRS. Some patients (n=28) were retrospectively diagnosed as having sepsis (nine were also positive on PCR for a viral infection), some (n=6) were retrospectively diagnosed as having a viral infection (three were also diagnosed as having confirmed or suspected sepsis), and some were retrospectively diagnosed as having systemic inflammation but no infection (n=12). Good separation can be seen between those patients having InSIRS (“Control”) compared to other causes of SIRS. However, separation between those patients with BaSIRS and VaSIRS is less clear, suggesting that, for at least some patients, inflammation due to multiple pathogen types can exist at the same time. Further, viral infection may lead to bacterial infection, or bacterial infection may lead to viral infection.

[0157] FIG. 37: Box and whisker plots demonstrating the performance, as measured by probability (Y axis), of each of the PaSIRS (“Protozoal”), BaSIRS (“Bacterial”), VaSIRS (“Viral”) and InSIRS (“SIRS”) final signatures in eight individual and independent GEO datasets covering a range of conditions including patients with sepsis, influenza, malaria, non-infectious systemic inflammation, and healthy subjects. The probabilities demonstrate that each systemic inflammatory signature is specific for its intended target condition. Combined probabilities were determined by mapping each score onto a sigmoidal curve via the logit function. Probabilities were then calculated using a LOO-CV approach.

### BRIEF DESCRIPTION OF THE TABLES

[0158] TABLE 1: Representative key human pathogens that are known to cause systemic inflammation and bacteremia, fungemia, viremia or protozoan parasitemia.

[0159] TABLE 2: Common human viruses that cause SIRS as part of their pathogenesis and for which there are specific anti-viral treatments.

[0160] TABLES 3: BaSIRS biomarker details including; Sequence identification number, gene symbol and Ensembl transcript ID.

[0161] TABLE 4: BaSIRS biomarker details including; Sequence identification number, gene symbol and GenBank accession.

[0162] TABLE 5: VaSIRS biomarker details including; Sequence identification number, gene symbol and Ensembl transcript ID.

[0163] TABLE 6: VaSIRS biomarker details including; Sequence identification number, gene symbol and GenBank accession.

[0164] TABLE 7: PaSIRS biomarker details including; Sequence identification number, gene symbol and Ensembl transcript ID.

[0165] TABLE 8: PaSIRS biomarker details including; Sequence identification number, gene symbol and GenBank accession.

[0166] TABLE 9: PaSIRS biomarker details including; Sequence identification number, gene symbol and Ensembl transcript ID.

[0167] TABLE 10: PaSIRS biomarker details including; Sequence identification number, gene symbol and GenBank accession.

[0168] TABLE 11: Exemplary Escherichia coli DNA sequence including Single Nucleotide Polymorphisms (SNPs) at positions 396 and 398 (bolded).

[0169] TABLE 12: Description of datasets and number of samples used as part of discovery of derived biomarkers for BaSIRS. The total number of genes that were able to be used across all of these datasets was 3698. All useable samples in these datasets were randomly divided into BaSIRS discovery and validation (see TABLE 10) sets.

[0170] TABLE 13: Description of datasets and number of samples used as part of validation of derived biomarkers for BaSIRS.

[0171] TABLE 14: Description of control datasets and number of samples used for subtraction from the derived biomarkers for BaSIRS. The subtraction process ensured that the BaSIRS derived biomarkers were specific.

[0172] TABLE 15: Performance (as measured by AUC) of the final BaSIRS signature in each of the Discovery, Validation and Control datasets.

[0173] TABLE 16: Performance (as meassured by AUC) of the top 102 BaSIRS derived biomarkers in each of the BaSIRS validation datasets. Only those derived biomarkers with a mean AUC>0.85 were used in a greedy search to identify the best combination of derived biomarkers.

[0174] TABLE 17: Details of Gene Expression Omnibus (GEO) datasets used for discovery of viral derived biomarkers.

[0175] TABLE 18: Details of Gene Expression Omnibus (GEO) datasets used for validation of viral derived biomarkers.

[0176] TABLE 19: Description of control datasets used for subtraction from the derived biomarkers for VaSIRS. The subtraction process ensured that the VaSIRS derived biomarkers were specific.

[0177] TABLE 20: List of derived VaSIRS biomarkers with an of AUC>0.8 in at least 11 of 14 viral datasets.

[0178] TABLE 21: Details of Gene Expression Omnibus (GEO) datasets used for discovery of protozoal derived biomarkers.

[0179] TABLE 22: Description of the GEO datasets used for validation of the protozoal derived biomarkers.

[0180] TABLE 23: Description of control datasets used for subtraction from the derived biomarkers for PaSIRS. The subtraction process ensured that the PaSIRS derived biomarkers were specific.

[0181] TABLE 24: Description of datasets used for discovery, validation and subtraction from the derived biomarkers for InSIRS. The subtraction process ensured that the InSIRS derived biomarkers were specific.

[0182] TABLE 25: Derived biomarkers grouped (A, B, C, D) based on correlation to each of the biomarkers in the final BaSIRS signature (OPLAH, ZHX2, TSPO, HCLS1).

[0183] TABLE 26: Derived biomarkers grouped (A, B, C, D) based on correlation to each of the biomarkers in the final VaSIRS signature (ISG15, IL16, OASL, ADGRE5).

[0184] TABLE 27: Derived biomarkers grouped (A, B, C, D) based on correlation to each of the biomarkers in the final PaSIRS signature (TTC17, G6PD, HERC6, LAP3, NUP160, TPP1).

[0185] TABLE 28: Derived biomarkers grouped (A, B, C, D) based on correlation to each of the biomarkers in the final inSIRS signature (ARL6IP5, ENTPD1, HEATR1, TNFSF8).

[0186] TABLE 29: Top performing (based on AUC) BaSIRS derived biomarkers following a greedy search on a combined dataset. The top derived biomarker was TSPO:HCLS1 with an AUC of 0.838. Incremental AUC increases can be made with the addition of further derived biomarkers as indicated.

[0187] TABLE 30: BaSIRS numerators and denominators appearing more than once in derived biomarkers with a mean AUC>0.85 in the validation datasets.

[0188] TABLE 31: Top performing (based on AUC) VaSIRS derived biomarkers following a greedy search on a combined dataset. The top derived biomarker was ISG15:IL16 with an AUC of 0.92. Incremental AUC increases can be made with the addition of further derived biomarkers as indicated.

[0189] TABLE 32: VaSIRS numerators and denominators appearing more than twice in the 473 derived biomarkers with a mean AUC>0.80 in at least 11 of 14 viral datasets.

[0190] TABLE 33: Top performing (based on AUC) PaSIRS derived biomarkers following a greedy search on a combined dataset. The top derived biomarker was TTC17:G6PD with an AUC of 0.96. Incremental AUC increases can be made with the addition of further derived biomarkers as indicated.

[0191] TABLE 34: PaSIRS numerators and denominators appearing more than twice in the 523 derived biomarkers with a mean AUC>0.75 in the validation datasets.

[0192] TABLE 35: TABLE of individual performance, in descending AUC, of the 523 PaSIRS derived biomarkers with an average AUC>0.75 across each of five protozoal datasets.

[0193] TABLE 36: Top performing (based on AUC) InSIRS derived biomarkers following a greedy search on a combined dataset. The top derived biomarker was ENTPD1:ARL6IP5 with an AUC of 0.898. Incremental AUC increases can be made with the addition of further derived biomarkers as indicated.

[0194] TABLE 37: inSIRS numerators and denominators appearing more than twice in the 164 derived biomarkers with a mean AUC>0.82 in the validation datasets.

[0195] TABLE 38: TABLE of individual performance, in descending AUC, of 164 inSIRS derived biomarkers with an average AUC>0.82 across each of six non-infectious systemic inflammation datasets.

[0196] TABLE 39: Interpretation of results obtained when using a combination of BaSIRS and bacterial detection.

[0197] TABLE 40: Interpretation of results obtained when using a combination of VaSIRS and virus detection.

[0198] TABLE 41: Interpretation of results obtained when using a combination of PaSIRS and protozoan detection.

### DETAILED DESCRIPTION OF THE INVENTION

### 1. Definitions

[0199] Unless defined otherwise, all technical and scientific terms used herein have the same meaning as commonly understood by those of ordinary skill in the art to which the invention belongs. Although any methods and materials similar or equivalent to those described herein can be used in the practice or testing of the present invention, preferred methods and materials are described. For the purposes of the present invention, the following terms are defined below.

[0200] The articles “a” and “an” are used herein to refer to one or to more than one (i.e., to at least one) of the grammatical object of the article. By way of example, “an element” means one element or more than one element.

[0201] As used herein, “and/or” refers to and encompasses any and all possible combinations of one or more of the associated listed items, as well as the lack of combinations when interpreted in the alternative (or).

[0202] The term “biomarker” broadly refers to any detectable compound, such as a protein, a peptide, a proteoglycan, a glycoprotein, a lipoprotein, a carbohydrate, a lipid, a nucleic acid (e.g., DNA, such as cDNA or amplified DNA, or RNA, such as mRNA), an organic or inorganic chemical, a natural or synthetic polymer, a small molecule (e.g., a metabolite), or a discriminating molecule or discriminating fragment of any of the foregoing, that is present in or derived from a sample, typically a biological sample. “Derived from” as used in this context refers to a compound that, when detected, is indicative of a particular molecule being present in the sample. For example, detection of a particular cDNA can be indicative of the presence of a particular RNA transcript in the sample. As another example, detection of or binding to a particular antibody can be indicative of the presence of a particular antigen (e.g., protein) in the sample. Here, a discriminating molecule or fragment is a molecule or fragment that, when detected, indicates presence or abundance of an above-identified compound. A biomarker can, for example, be isolated from a sample, directly measured in a sample, or detected in or determined to be in a sample. A biomarker can, for example, be functional, partially functional, or non-functional. In specific embodiments, the “biomarkers” include “host response biomarkers”, and “pathogen biomarkers”, which are described in more detail below. A biomarker is considered to be informative for a SIRS condition as disclosed herein if a measurable aspect of the biomarker is associated with the presence of the SIRS condition in a subject in comparison to a predetermined value or a reference profile from a control population. Such a measurable aspect may include, for example, the presence, absence, or level of the biomarker in the sample, and/or its presence or level as a part of a profile of more than one biomarker, for example as part of a combination with one or more other biomarkers, including as part of a derived biomarker combination as described herein.

[0203] The term “biomarker value” refers to a value measured or derived for at least one corresponding biomarker of a subject and which is typically at least partially indicative of a level of a biomarker in a sample taken from the subject. Thus, the biomarker values could be measured biomarker values, which are values of biomarkers measured for the subject. These values may be quantitative or qualitative. Fo example, a measured biomarker value may refer to the presence or absence of a biomarker or may refer to a level of a biomarker, in a sample. The measured biomarker values can be values relating to raw or normalized biomarker levels (e.g., a raw, non-normalized biomarker level, or a normalized biomarker levels that is determined relative to an internal or external control biomarker level) and to mathematically transformed biomarker levels (e.g., a logarithmic representation of a biomarker level such as amplification amount, cycle time, etc.). Alternatively, the biomarker values could be derived biomarker values, which are values that have been derived from one or more measured biomarker values, for example by applying a function to the one or more measured biomarker values. Biomarker values can be of any appropriate form depending on the manner in which the values are determined. For example, the biomarker values could be determined using high-throughput technologies such as mass spectrometry, sequencing platforms, array and hybridization platforms, immunoassays, flow cytometry, or any combination of such technologies and in one preferred example, the biomarker values relate to a level of activity or abundance of an expression product or other measurable molecule, quantified using a technique such as PCR, sequencing or the like. In this case, the biomarker values can be in the form of amplification amounts, or cycle times, which are a logarithmic representation of the levels of the biomarker within a sample and which thus correspond to mathematical transformations of raw or normalized biomarker levels, as will be appreciated by persons skilled in the art and as will be described in more detail below. Thus, in situations in which mathematically transformed biomarker values are used as measured biomarker values, the expression “derived biomarker value being indicative of a ratio of levels of a plurality of biomarkers” and the like does not necessarily mean that the derived biomarker value is one that results from a division of one measured biomarker value by another measured biomarker value. Instead, the measured biomarker values can be combined using any suitable function, whereby the resulting derived biomarker value is one that corresponds to or reflects a ratio of non-normalized (e.g., raw) or normalized biomarker levels.

[0204] The term “biomarker profile” refers to one or a plurality of one or more types of biomarkers (e.g., an mRNA molecule, a cDNA molecule and/or a protein, lipopolysaccharide, etc.), or an indication thereof, together with a feature, such as a measurable aspect (e.g., biomarker value that is measured or derived), of the biomarker(s). A biomarker profile may comprise a single biomarker level that correlates with the presence, absence or degree of a condition (e.g., BaSIRS or VaSIRS, or PaSIRS or InSIRS). Alternatively, a biomarker profile may comprise at least two such biomarkers or indications thereof, where the biomarkers can be in the same or different classes, such as, for example, a nucleic acid and a polypeptide. Thus, a biomarker profile may comprise at least 1, 2, 3, 4, 5, 6, 7, 8, 9, 10, 11, 12, 13, 14, 15, 16, 17, 18, 19, 20, 21, 22, 23, 24, 25, 30, 35, 40, 45, 50, 55, 60, 65, 70, 75, 80, 85, 90, 95, or 100 or more biomarkers or indications thereof. In some embodiments, a biomarker profile comprises hundreds, or even thousands, of biomarkers or indications thereof. A biomarker profile can further comprise one or more controls or internal standards. In certain embodiments, the biomarker profile comprises at least one biomarker, or indication thereof, that serves as an internal standard. In other embodiments, a biomarker profile comprises an indication of one or more types of biomarkers. The term “indication” as used herein in this context merely refers to a situation where the biomarker profile contains symbols, data, abbreviations or other similar indicia for a biomarker, rather than the biomarker molecular entity itself. The term “biomarker profile” is also used herein to refer to a biomarker value or combination of at least two biomarker values, wherein individual biomarker values correspond to values of biomarkers that can be measured or derived from one or more subjects, which combination is characteristic of a discrete condition, stage of condition, subtype of condition. The term “profile biomarkers” is used to refer to a subset of the biomarkers that have been identified for use in a biomarker profile that can be used in performing a clinical assessment, such as to rule in or rule out a specific condition, different stages or severity of conditions, or subtypes of different conditions. The number of profile biomarkers will vary, but is typically of the order of 10 or less.

[0205] The terms “complementary” and “complementarity” refer to polynucleotides (i.e., a sequence of nucleotides) related by the base-pairing rules. For example, the sequence “A-G-T,” is complementary to the sequence “T-C-A.” Complementarity may be “partial,” in which only some of the nucleic acids' bases are matched according to the base pairing rules. Or, there may be “complete” or “total” complementarity between the nucleic acids. The degree of complementarity between nucleic acid strands has significant effects on the efficiency and strength of hybridization between nucleic acid strands.

[0206] Throughout this specification, unless the context requires otherwise, the words “comprise,” “comprises” and “comprising” will be understood to imply the inclusion of a stated step or element or group of steps or elements but not the exclusion of any other step or element or group of steps or elements. Thus, use of the term “comprising” and the like indicates that the listed elements are required or mandatory, but that other elements are optional and may or may not be present. By “consisting of” is meant including, and limited to, whatever follows the phrase “consisting of”. Thus, the phrase “consisting of” indicates that the listed elements are required or mandatory, and that no other elements may be present. By “consisting essentially of” is meant including any elements listed after the phrase, and limited to other elements that do not interfere with or contribute to the activity or action specified in the disclosure for the listed elements. Thus, the phrase “consisting essentially of” indicates that the listed elements are required or mandatory, but that other elements are optional and may or may not be present depending upon whether or not they affect the activity or action of the listed elements.

[0207] The term “correlating” refers to determining a relationship between one type of data with another or with a state.

[0208] The term “degree” of BaSIRS, VaSIRS, PaSIRS, or InSIRS, as used herein, refers to the seriousness, severity, stage or state of a BaSIRS, VaSIRS, PaSIRS, or InSIRS. For example, a BaSIRS, VaSIRS, PaSIRS, or InSIRS may be characterized as mild, moderate or severe. A person of skill in the art would be able to determine or assess the degree of a particular BaSIRS, VaSIRS, PaSIRS, or InSIRS. For example, the degree of a BaSIRS, VaSIRS, PaSIRS, or InSIRS may be determined by comparing the likelihood or length of survival of a subject having a BaSIRS, VaSIRS, PaSIRS, or InSIRS with the likelihood or length of survival in other subjects having BaSIRS, VaSIRS, PaSIRS, or InSIRS. In other embodiments, the degree of a BaSIRS, VaSIRS, PaSIRS, or InSIRS may be determined by comparing the clinical signs of a subject having a condition with the degree of the clinical signs in other subjects having BaSIRS, VaSIRS, PaSIRS, or InSIRS.

[0209] As used herein, the terms “diagnosis”, “diagnosing” and the like are used interchangeably herein to encompass determining the likelihood that a subject will develop a condition, or the existence or nature of a condition in a subject. These terms also encompass determining the severity of disease or episode of disease, as well as in the context of rational therapy, in which the diagnosis guides therapy, including initial selection of therapy, modification of therapy (e.g., adjustment of dose or dosage regimen), and the like. By “likelihood” is meant a measure of whether a subject with particular measured or derived biomarker values actually has a condition (or not) based on a given mathematical model. An increased likelihood for example may be relative or absolute and may be expressed qualitatively or quantitatively. For instance, an increased likelihood may be determined simply by determining the subject's measured, derived or indicator biomarker values for at least two BaSIRS, VaSIRS, PaSIRS, or InSIRS biomarkers in combination with at least one pathogen specific biomarker and placing the subject in an “increased likelihood” category, based upon previous population studies. The term “likelihood” is also used interchangeably herein with the term “probability”. The term “risk” relates to the possibility or probability of a particular event occurring at some point in the future. “Risk stratification” refers to an arraying of known clinical risk factors to allow physicians to classify patients into a low, moderate, high or highest risk of developing a particular disease or condition.

[0210] The term “gene”, as used herein, refers to a stretch of nucleic acid that codes for a polypeptide or for an RNA chain that has a function. While it is the exon region of a gene that is transcribed to form mRNA, the term “gene” also includes regulatory regions such as promoters and enhancers that govern expression of the exon region.

[0211] By “high density acid arrays” and the like is meant those arrays that contain at least 400 different features (e.g., probes) per cm².

[0212] The term “indicator” as used herein refers to a result or representation of a result, including any information, number, ratio, signal, sign, mark, or note by which a skilled artisan can estimate and/or determine a likelihood or risk of whether or not a subject is suffering from a given disease or condition. In the case of the present invention, the “indicator” may optionally be used together with other clinical characteristics, to arrive at a diagnosis (that is, the occurrence or nonoccurrence) of BaSIRS, VaSIRS, PaSIRS, or InSIRS in a subject. That such an indicator is “determined” is not meant to imply that the indicator is 100% accurate. The skilled clinician may use the indicator together with other clinical indicia to arrive at a diagnosis.

[0213] The term “immobilized” means that a molecular species of interest is fixed to a solid support, suitably by covalent linkage. This covalent linkage can be achieved by different means depending on the molecular nature of the molecular species. Moreover, the molecular species may be also fixed on the solid support by electrostatic forces, hydrophobic or hydrophilic interactions or Van-der-Waals forces. The above described physico-chemical interactions typically occur in interactions between molecules. In particular embodiments, all that is required is that the molecules (e.g., nucleic acids or polypeptides) remain immobilized or attached to a support under conditions in which it is intended to use the support, for example in applications requiring nucleic acid amplification and/or sequencing or in in antibody-binding assays. For example, oligonucleotides or primers are immobilized such that a 3′ end is available for enzymatic extension and/or at least a portion of the sequence is capable of hybridizing to a complementary sequence. In some embodiments, immobilization can occur via hybridization to a surface attached primer, in which case the immobilized primer or oligonucleotide may be in the 3′-5′ orientation. In other embodiments, immobilization can occur by means other than base-pairing hybridization, such as the covalent attachment.

[0214] The term “immune system”, as used herein, refers to cells, molecular components and mechanisms, including antigen-specific and non-specific categories of the adaptive and innate immune systems, respectively, that provide a defense against damage and insults resulting from a viral infection. The term “innate immune system” refers to a host's non-specific reaction to insult to include antigen-nonspecific defense cells, molecular components and mechanisms that come into action immediately or within several hours after exposure to almost any insult or antigen. Elements of the innate immunity include for example phagocytic cells (monocytes, macrophages, dendritic cells, polymorphonuclear leukocytes such as neutrophils, reticuloendothelial cells such as Kupffer cells, and microglia), cells that release inflammatory mediators (basophils, mast cells and eosinophils), natural killer cells (NK cells) and physical barriers and molecules such as keratin, mucous, secretions, complement proteins, immunoglobulin M (IgM), acute phase proteins, fibrinogen and molecules of the clotting cascade, and cytokines. Effector compounds of the innate immune system include chemicals such as lysozymes, IgM, mucous and chemoattractants (e.g., cytokines or histamine), complement and clotting proteins. The term “adaptive immune system” refers to antigen-specific cells, molecular components and mechanisms that emerge over several days, and react with and remove a specific antigen. The adaptive immune system develops throughout a host's lifetime. The adaptive immune system is based on leukocytes, and is divided into two major sections: the humoral immune system, which acts mainly via immunoglobulins produced by B cells, and the cell-mediated immune system, which functions mainly via T cells.

[0215] Reference herein to “immuno-interactive” includes reference to any interaction, reaction, or other form of association between molecules and in particular where one of the molecules is, or mimics, a component of the immune system.

[0216] The term “level” as used herein encompasses the absolute amount of a biomarker as referred to herein, the relative amount or concentration of the biomarker as well as any value or parameter which correlates thereto or can be derived therefrom. For example, the level can be a copy number, weight, moles, abundance, concentration such as μg/L or a relative amount such as 1.0, 1.5, 2.0, 2.5, 3, 5, 10, 15, 20, 25, 30, 40, 60, 80 or 100 times a reference or control level. Optionally, the term level includes the level of a biomarker normalized to an internal normalization control, such as the expression of a housekeeping gene.

[0217] The term “microarray” refers to an arrangement of hybridizable array elements, e.g., probes (including primers), ligands, biomarker nucleic acid sequence or protein sequences on a substrate.

[0218] By monitoring the “progression” of a SIRS condition over time, is meant that changes in the severity (e.g., worsening or improvement) of the SIRS condition or particular aspects of the SIRS condition are monitored over time.

[0219] The term “nucleic acid” or “polynucleotide” as used herein includes RNA, mRNA, miRNA, cRNA, cDNA mtDNA, or DNA. The term typically refers to a polymeric form of nucleotides of at least 10 bases in length, either ribonucleotides or deoxynucleotides or a modified form of either type of nucleotide. The term includes single and double stranded forms of DNA or RNA.

[0220] By “obtained” is meant to come into possession. Samples so obtained include, for example, nucleic acid extracts or polypeptide extracts isolated or derived from a particular source. For instance, the extract may be isolated directly from a biological fluid or tissue of a subject.

[0221] The term “pathogen biomarker” refers to any bacterial, viral or protozoan molecule. The pathogen molecules can be nucleic acid, protein, carbohydrate, lipid, metabolite or combinations of such molecules.

[0222] As used herein, the term “positive response” means that the result of a treatment regimen includes some clinically significant benefit, such as the prevention, or reduction of severity, of symptoms, or a slowing of the progression of the condition. By contrast, the term “negative response” means that a treatment regimen provides no clinically significant benefit, such as the prevention, or reduction of severity, of symptoms, or increases the rate of progression of the condition.

[0223] “Protein”, “polypeptide” and “peptide” are used interchangeably herein to refer to a polymer of amino acid residues and to variants and synthetic analogues of the same.

[0224] By “primer” is meant an oligonucleotide which, when paired with a strand of DNA, is capable of initiating the synthesis of a primer extension product in the presence of a suitable polymerizing agent. The primer is preferably single-stranded for maximum efficiency in amplification but can alternatively be double-stranded. A primer must be sufficiently long to prime the synthesis of extension products in the presence of the polymerization agent. The length of the primer depends on many factors, including application, temperature to be employed, template reaction conditions, other reagents, and source of primers. For example, depending on the complexity of the target sequence, the primer may be at least about 5, 6, 7, 8, 9, 10, 11, 12, 13, 14, 15, 16, 17, 18, 19, 20, 21, 22, 23, 24, 25, 26, 27, 28, 29, 30, 35, 40, 50, 75, 100, 150, 200, 300, 400, 500, to one base shorter in length than the template sequence at the 3′ end of the primer to allow extension of a nucleic acid chain, though the 5′ end of the primer may extend in length beyond the 3′ end of the template sequence. In certain embodiments, primers can be large polynucleotides, such as from about 35 nucleotides to several kilobases or more. Primers can be selected to be “substantially complementary” to the sequence on the template to which it is designed to hybridize and serve as a site for the initiation of synthesis. By “substantially complementary”, it is meant that the primer is sufficiently complementary to hybridize with a target polynucleotide. Desirably, the primer contains no mismatches with the template to which it is designed to hybridize but this is not essential. For example, non-complementary nucleotide residues can be attached to the 5′ end of the primer, with the remainder of the primer sequence being complementary to the template. Alternatively, non-complementary nucleotide residues or a stretch of non-complementary nucleotide residues can be interspersed into a primer, provided that the primer sequence has sufficient complementarity with the sequence of the template to hybridize therewith and thereby form a template for synthesis of the extension product of the primer.

[0225] As used herein, the term “probe” refers to a molecule that binds to a specific sequence or sub-sequence or other moiety of another molecule. Unless otherwise indicated, the term “probe” typically refers to a nucleic acid probe that binds to another nucleic acid, also referred to herein as a “target polynucleotide”, through complementary base pairing. Probes can bind target polynucleotides lacking complete sequence complementarity with the probe, depending on the stringency of the hybridization conditions. Probes can be labeled directly or indirectly and include primers within their scope.

[0226] The term “sample” as used herein includes any biological specimen that may be extracted, untreated, treated, diluted or concentrated from a subject. Samples may include, without limitation, biological fluids, exudates such as whole blood, serum, red blood cells, white blood cells, plasma, saliva, urine, stool (i.e., faeces), tears, sweat, phlegm, sebum, nipple aspirate, ductal lavage, bronchial, pharyngeal or nasal lavage or swab, tumor exudates, synovial fluid, ascitic fluid, peritoneal fluid, amniotic fluid, cerebrospinal fluid, lymph, fine needle aspirate, amniotic fluid, any other bodily fluid, cell lysates, cellular secretion products, inflammation fluid, semen and vaginal secretions. Samples may include tissue samples and biopsies, tissue homogenates, washes, swabs and the like. Advantageous samples may include ones comprising any one or more biomarkers as taught herein in detectable quantities. Suitably, the sample is readily obtainable by minimally invasive methods, allowing the removal or isolation of the sample from the subject. In certain embodiments, the sample contains blood, especially peripheral blood, or a fraction or extract thereof. Typically, the sample comprises blood cells such as mature, immature or developing leukocytes, including lymphocytes, polymorphonuclear leukocytes, neutrophils, monocytes, reticulocytes, basophils, coelomocytes, hemocytes, eosinophils, megakaryocytes, macrophages, dendritic cells natural killer cells, or fraction of such cells (e.g., a nucleic acid or protein fraction). In specific embodiments, the sample comprises leukocytes including peripheral blood mononuclear cells (PBMC).

[0227] The term “solid support” as used herein refers to a solid inert surface or body to which a molecular species, such as a nucleic acid and polypeptides can be immobilized. Non-limiting examples of solid supports include glass surfaces, plastic surfaces, latex, dextran, polystyrene surfaces, polypropylene surfaces, polyacrylamide gels, gold surfaces, and silicon wafers. In some embodiments, the solid supports are in the form of membranes, chips or particles. For example, the solid support may be a glass surface (e.g., a planar surface of a flow cell channel). In some embodiments, the solid support may comprise an inert substrate or matrix which has been “functionalized”, such as by applying a layer or coating of an intermediate material comprising reactive groups which permit covalent attachment to molecules such as polynucleotides. By way of non-limiting example, such supports can include polyacrylamide hydrogels supported on an inert substrate such as glass. The molecules (e.g., polynucleotides) can be directly covalently attached to the intermediate material (e.g., a hydrogel) but the intermediate material can itself be non-covalently attached to the substrate or matrix (e.g., a glass substrate). The support can include a plurality of particles or beads each having a different attached molecular species.

[0228] As used herein, the term SIRS (“systemic inflammatory response syndrome”) refers to a clinical response arising from a non-specific insult with two or more of the following measureable clinical characteristics; a body temperature greater than 38° C. or less than 36° C., a heart rate greater than 90 beats per minute, a respiratory rate greater than 20 per minute, a white blood cell count (total leukocytes) greater than 12,000 per mm³ or less than 4,000 per mm³, or a band neutrophil percentage greater than 10%. From an immunological perspective, it may be seen as representing a systemic response to insult (e.g., major surgery) or systemic inflammation. As used herein, “VaSIRS” includes any one or more (e.g., 1, 2, 3, 4, 5) of the clinical responses noted above but with underlying viral infection etiology. Confirmation of infection can be determined using any suitable procedure known in the art, illustrative examples of which include nucleic acid detection (e.g., polymerase chain reaction (PCR), immunological detection (e.g., ELISA), isolation of virus from infected cells, cell lysis and imaging techniques such as electron microscopy. From an immunological perspective, VaSIRS may be seen as a systemic response to viral infection, whether it is a local, peripheral or systemic infection.

[0229] The terms “subject”, “individual” and “patient” are used interchangeably herein to refer to an animal subject, particularly a vertebrate subject, and even more particularly a mammalian subject. Suitable vertebrate animals that fall within the scope of the invention include, but are not restricted to, any member of the phylum Chordata, subphylum vertebrata including primates, rodents (e.g., mice rats, guinea pigs), lagomorphs (e.g., rabbits, hares), bovines (e.g., cattle), ovines (e.g., sheep), caprines (e.g., goats), porcines (e.g., pigs), equines (e.g., horses), canines (e.g., dogs), felines (e.g., cats), avians (e.g., chickens, turkeys, ducks, geese, companion birds such as canaries, budgerigars etc.), marine mammals (e.g., dolphins, whales), reptiles (snakes, frogs, lizards, etc.), and fish. A preferred subject is a primate (e.g., a human, ape, monkey, chimpanzee). The subject suitably has at least one (e.g., 1, 2, 3, 4, 5 or more) clinical sign of SIRS.

[0230] As used herein, the term “treatment regimen” refers to prophylactic and/or therapeutic (i.e., after onset of a specified condition) treatments, unless the context specifically indicates otherwise. The term “treatment regimen” encompasses natural substances and pharmaceutical agents (i.e., “drugs”) as well as any other treatment regimen including but not limited to dietary treatments, physical therapy or exercise regimens, surgical interventions, and combinations thereof.

[0231] It will be appreciated that the terms used herein and associated definitions are used for the purpose of explanation only and are not intended to be limiting.

### 2. Pan-Bacterial, Pan-Viral, Pan-Protozoal and Infection-Negative SIRS Biomarkers and their Use for Identifying Subjects with BaSIRS, VaSIRS, PaSIRS or InSIRS

[0232] The present invention concerns methods, apparatus, compositions and kits for identifying subjects with BaSIRS, VaSIRS, PaSIRS or InSIRS. In particular, BaSIRS, VaSIRS, PaSIRS, or InSIRS biomarkers and BIP, VIP and PIP biomarkers are disclosed for use alone or in combination in these modalities to assess the likelihood of the presence, absence or degree of BaSIRS, VaSIRS, PaSIRS or InSIRS in subjects. The methods, apparatus, compositions and kits of the invention are useful for early detection of BaSIRS, VaSIRS, PaSIRS or InSIRS, thus allowing better treatment interventions for subjects with symptoms of SIRS that stem at least in part from a bacterial, viral, protozoal infection or non-infectious causes.

[0233] The present inventors have determined that certain expression products are commonly, specifically and differentially expressed in humans, including cells of the immune system, during systemic inflammations with a range of bacterial etiologies underscoring the conserved nature of the host response to a BaSIRS. The results presented herein provide clear evidence that a unique biologically-relevant biomarker profile predicts BaSIRS with a remarkable degree of accuracy. This “pan-bacterial” systemic inflammation biomarker profile was validated in independently derived external datasets and publicly available datasets (see, TABLES 11 and 12 for the BaSIRS datasets used) and used to distinguish BaSIRS from other SIRS conditions including VaSIRS, PaSIRS and InSIRS (including autoimmune disease associated SIRS (ADaSIRS), cancer associated SIRS (CaSIRS) and trauma associated SIRS (TaSIRS)).

[0234] The present inventors have also determined that certain expression products are commonly, specifically and differentially expressed in humans, macaques, chimpanzees, mice, rats and pigs during systemic inflammations with a range of viral etiologies (e.g., Baltimore virus classification Groups I, II, III, IV, V, VI and VII), underscoring the conserved nature of the host response to a VaSIRS. The results presented herein provide clear evidence that a unique biologically-relevant biomarker profile predicts VaSIRS with a remarkable degree of accuracy. This “pan-viral” systemic inflammation biomarker profile was validated in independently derived external datasets and publicly available datasets (see, TABLES 16 and 17 for the VaSIRS datasets used) and used to distinguish VaSIRS from other SIRS conditions including BaSIRS, PaSIRS and InSIRS (including autoimmune disease associated SIRS (ADaSIRS), cancer associated SIRS (CaSIRS) and trauma associated SIRS (TaSIRS)).

[0235] It has also been determined that certain expression products are commonly, specifically and differentially expressed in humans during systemic inflammations with a range of protozoan etiologies (Plasmodium, Leishmania, Trypanosoma, Entamoeba) underscoring the conserved nature of the host response to a PaSIRS. The results presented herein provide clear evidence that a unique biologically-relevant biomarker profile predicts PaSIRS with a remarkable degree of accuracy. This “pan-protozoal” systemic inflammation biomarker profile was validated in publicly available datasets (see, TABLES 20 and 21 for the PaSIRS datasets used) and used to distinguish PaSIRS from other SIRS conditions including BaSIRS, VaSIRS and InSIRS (including autoimmune disease associated SIRS (ADaSIRS), cancer associated SIRS (CaSIRS) and trauma associated SIRS (TaSIRS)).

[0236] Additionally, it has been determined that certain expression products are commonly, specifically and differentially expressed in humans during systemic inflammations with a range of non-infectious etiologies underscoring the conserved nature of the host response of InSIRS. The results presented herein provide clear evidence that a unique biologically-relevant biomarker profile predicts InSIRS with a remarkable degree of accuracy. This infection-negative systemic inflammation biomarker profile was validated in publicly available datasets (see, TABLE 23 for the InSIRS datasets used) and used to distinguish InSIRS from other SIRS conditions including bacterial associated SIRS (BaSIRS), virus associated SIRS (VaSIRS) and protozoal associated SIRS (PaSIRS).

[0237] Overall, these findings provide compelling evidence that the expression products disclosed herein can function as biomarkers, respectively, for BaSIRS, VaSIRS, PaSIRS and InSIRS and may serve as useful diagnostic tools for triaging treatment decisions for SIRS-affected subjects. In this regard, it is proposed that the methods, apparatus, compositions and kits disclosed herein that are based on these biomarkers may serve in point-of-care diagnostics that allow for rapid and inexpensive screening for, and differentiation of, BaSIRS, VaSIRS, PaSIRS and InSIRS, which may result in significant cost savings to the medical system as SIRS-affected subjects can be exposed to therapeutic agents that are suitable for treating the etiology (e.g., bacterial, viral, protozoan or non-infectious) of their SIRS condition as opposed to therapeutic agents for SIRS conditions with other etiologies.

[0238] The present inventors have also identified, and designed assays for, common nucleic acid molecules in bacteria and protozoans and identified assays for detection of viruses at the genus level. For bacteria, the invention arises from the discovery that limited numbers of bacterial DNA Single Nucleotide Polymorphisms (SNPs) (SNP biomarkers) can be used to sensitively detect, quantify and broadly categorize bacterial DNA in the presence of host mammalian DNA. Further, the inventors have designed a simple, multiplexed nucleic acid amplification assay that can detect a limited number of human key protozoal pathogens that cause parasitemia. Further, multiplex assays that simultaneously detect the presence of a number of different, but limited, important human pathogenic virus genera are commercially available or have been reported in the scientific literature.

[0239] Thus, specific expression products are disclosed herein as host response specific biomarkers that provide a means for identifying BaSIRS, VaSIRS, PaSIRS or InSIRS and/or for distinguishing these systemic inflammatory conditions from each other for a subject with BaSIRS, VaSIRS, PaSIRS or InSIRS. Evaluation of these BaSIRS, VaSIRS, PaSIRS or InSIRS biomarkers through analysis of their levels in a subject or in a sample taken from a subject provides a measured or derived biomarker value for determinating an indicator that can be used for assessing the presence, absence or degree of BaSIRS, VaSIRS, PaSIRS or InSIRS in a subject.

[0240] Further, specific nucleic acids are disclosed herein as pathogen specific biomarkers, including bacterial SNP biomarkers, or conserved protozoal DNA sequence biomarkers, or conserved viral DNA sequence biomarkers, that provide a means for identifying bacterial infection positive (BIP), viral infection positive (VIP) or protozoal infection positive (PIP) samples and/or for distinguishing these three infection-positive conditions from each other and other infection-negative conditions. Evaluation of these nucleic acid biomarkers through analysis of their levels in a subject or in a sample taken from a subject provides a measured or derived biomarker value for determinating an indicator that can be used for assessing the presence, absence or degree of BaSIRS, VaSIRS, PaSIRS or InSIRS in a subject.

[0241] Additionally, unique combinations of host response specific biomarkers for identifying BaSIRS, VaSIRS, PaSIRS or InSIRS, and optionally pathogen specific biomarkers for identifying BIP, VIP or PIP, are disclosed that provide a means of more accurately identifying, compared to their use in isolation, BaSIRS, VaSIRS, PaSIRS or InSIRS and/or for distinguishing these systemic inflammatory conditions from each other. In certain embodiments, the host response specific and pathogen specific biomarker combinations are evaluated through analysis of their combined levels in a subject or in a sample taken from a subject, to thereby determine an indicator that is useful for assessing the presence, absence or degree of BaSIRS, VaSIRS, PaSIRS or InSIRS in a subject.

[0242] Accordingly, biomarker values can be measured biomarker raw data values, which are values of biomarkers measured for the subject, or alternatively could be derived biomarker values, which are values that have been derived from one or more measured biomarker values, for example by applying a function to the measured biomarker values. As used herein, biomarkers values to which a function has been applied are referred to as “derived biomarkers values” and the biomarkers to which the derived biomarker values correspond are referred to herein as “derived biomarkers”. As used herein, host response specific derived biomarker values and pathogen specific biomarker values to which a combining function has been applied are referred to as “compound biomarker values” and the biomarkers to which the compound biomarker values correspond are referred to herein as “compound biomarkers”.

[0243] The biomarker values may be determined in any one of a number of ways. An exemplary method of determining biomarker values is described by the present inventors in WO 2015/117204, which is incorporated herein by reference in its entirety. In one example, the process of determining biomarker values can include measuring the biomarker values, for example by performing tests on the subject or on sample(s) taken from the subject. More typically however, the step of determining the biomarker values includes having an electronic processing device receive or otherwise obtain biomarker values that have been previously measured or derived. This could include for example, retrieving the biomarker values from a data store such as a remote database, obtaining biomarker values that have been manually inputted using an input device, or the like. The biomarker values are combined by the electronic processing device, for example by adding, multiplying, subtracting, or dividing biomarker values, to provide one or more derived biomarker values. In its simplest form, a single derived biomarker value may represent an indicator value that is at least partially indicative of an indicator representing a presence, absence or degree of a condition. Alternatively, a plurality of derived biomarker values may be combined using a combining function to provide an indicator value. in other embodiments, at least one derived biomarker value is combined with one or more biomarker values to provide a compound biomarker value representing an indicator value. The combining step is performed so that multiple biomarker values that are measured or derived can be combined into a single indicator value, providing a more useful and straightforward mechanism for allowing the indicator to be interpreted and hence used in diagnosing the presence, absence or degree of BaSIRS, VaSIRS, PaSIRS or InSIRS in the subject.

[0244] Accordingly, an indicator is determined using a combination of the plurality of biomarker values, the indicator being at least partially indicative of the presence, absence or degree of BaSIRS, VaSIRS, PaSIRS or InSIRS. Assuming the method is performed using an electronic processing device, an indication of the indicator is optionally displayed or otherwise provided to the user. In this regard, the indication could be a graphical or alphanumeric representation of an indicator value. Alternatively however, the indication could be the result of a comparison of the indicator value to predefined thresholds or ranges, or alternatively could be an indication of the presence, absence, degree of BaSIRS, VaSIRS, PaSIRS or InSIRS, derived using the indicator.

[0245] In some embodiments in which a plurality of host response specific biomarkers and derived biomarker values are used, in order to ensure that an effective diagnosis can be determined, at least two of the biomarkers have a mutual correlation in respect of BaSIRS, VaSIRS, PaSIRS or InSIRS that lies within a mutual correlation range, the mutual correlation range being between ±0.9. This requirement means that the two biomarkers are not entirely correlated in respect of each other when considered in the context of the BaSIRS, VaSIRS, PaSIRS or InSIRS being diagnosed. In other words, at least two of the biomarkers in the combination respond differently as the condition changes, which adds significantly to their ability when combined to discriminate between at least two conditions, to diagnose the presence, absence or degree of BaSIRS, VaSIRS, PaSIRS or InSIRS in or of the subject. Representative biomarker combinations, which are also referred to herein as “derived biomarker combinations”, which meet these criteria, are listed in TABLES A to D.

[0246] Typically, the requirement that host response specific biomarkers have a low mutual correlation means that the biomarkers may relate to different biological attributes or domains such as, but not limited, to different molecular functions, different biological processes and different cellular components. Illustrative examples of molecular function include addition of, or removal of, one of more of the following moieties to, or from, a protein, polypeptide, peptide, nucleic acid (e.g., DNA, RNA): linear, branched, saturated or unsaturated alkyl (e.g., C₁-C₂₄ alkyl); phosphate; ubiquitin; acyl; fatty acid, lipid, phospholipid; nucleotide base; hydroxyl and the like. Molecular functions also include signaling pathways, including without limitation, receptor signaling pathways and nuclear signaling pathways. Non-limiting examples of molecular functions also include cleavage of a nucleic acid, peptide, polypeptide or protein at one or more sites; polymerization of a nucleic acid, peptide, polypeptide or protein; translocation through a cell membrane (e.g., outer cell membrane; nuclear membrane); translocation into or out of a cell organelle (e.g., Golgi apparatus, lysosome, endoplasmic reticulum, nucleus, mitochondria); receptor binding, receptor signaling, membrane channel binding, membrane channel influx or efflux; and the like.

[0247] Illustrative examples of biological processes include: stages of the cell cycle such as meiosis, mitosis, cell division, prophase, metaphase, anaphase, telophase and interphase, stages of cell differentiation; apoptosis; necrosis; chemotaxis; immune responses including adaptive and innate immune responses, pro-inflammatory immune responses, autoimmune responses, tolerogenic responses and the like. Other illustrative examples of biological processes include generating or breaking down adenosine triphosphate (ATP), saccharides, polysaccharides, fatty acids, lipids, phospholipids, sphingolipids, glycolipids, cholesterol, nucleotides, nucleic acids, membranes (e.g., cell plasma membrane, nuclear membrane), amino acids, peptides, polypeptides, proteins and the like. Representative examples of cellular components include organelles, membranes, as for example noted above, and others.

[0248] It will be understood that the use of host response specific biomarkers that have different biological attributes or domains provides further information than if the biomarkers were related to the same or common biological attributes or domains. In this regard, it will be appreciated if the at least two biomarkers are highly correlated to each other, the use of both biomarkers would add little diagnostic improvement compared to the use of a single one of the biomarkers. Accordingly, an indicator-determining method of the present invention in which a plurality of biomarkers and biomarker values are used preferably employ biomarkers that are not well correlated with each other, thereby ensuring that the inclusion of each biomarker in the method adds significantly to the discriminative ability of the indicator.

[0249] Further, it will be understood that the use of a combination of host response specific biomarkers that have a low mutual correlation with pathogen specific biomarkers adds significantly to the positive and negative discriminative ability of the biomarker indicator. Accordingly, an indicator-determining method of the present invention in which a plurality of biomarkers and biomarker values are used preferably employ host response biomarkers that are not well correlated with each other in combination with pathogen specific biomarkers, thereby ensuring that the inclusion of each biomarker in the method adds significantly to the discriminative ability of the indicator.

[0250] Despite this, in order to ensure that the indicator can accurately be used in performing the discrimination between at least two conditions (e.g., BaSIRS, VaSIRS, PaSIRS or InSIRS) or the diagnosis of the presence, absence or degree of BaSIRS, VaSIRS, PaSIRS or InSIRS, the indicator has a performance value that is greater than or equal to a performance threshold. The performance threshold may be of any suitable form but is to be typically indicative of an explained variance of at least 0.3, or an equivalent value of another performance measure.

[0251] Suitably, a combination of biomarkers is employed, which includes (1) host response specific biomarkers having a mutual correlation between ±0.9 and which combination provides an explained variance of at least 0.3, and; (2) pathogen specific biomarkers. In specific embodiments, host response specific biomarkers are used in combination with pathogen specific biomarkers when greater discriminatory power (positive or negative predictive value) is required. Also, this typically allows an indicator to be defined that is suitable for ensuring that an accurate discrimination and/or diagnosis can be obtained whilst minimizing the number of biomarkers that are required. Typically the mutual correlation range is one of ±0.8; ±0.7; ±0.6; ±0.5; ±0.4; ±0.3; ±0.2; and, ±0.1. Typically each BaSIRS, VaSIRS, PaSIRS or InSIRS biomarker has a condition correlation with the presence, absence or degree of BaSIRS, VaSIRS, PaSIRS or InSIRS that lies outside a condition correlation range, the condition correlation range being between ±0.3 and more typically ±0.9; ±0.8; ±0.7; ±0.6; ±0.5; and, ±0.4. Typically the performance threshold is indicative of an explained variance of at least one of 0.4; 0.5; 0.6; 0.7; 0.8; and 0.9.

[0252] It will be understood that in this context, the biomarkers used within the above-described method can define a biomarker profile for BaSIRS, VaSIRS, PaSIRS or InSIRS, which includes a minimal number of biomarkers, whilst maintaining sufficient performance to allow the biomarker profile to be used in making a clinically relevant diagnosis or differentiation. Minimizing the number of biomarkers used minimizes the costs associated with performing diagnostic tests and in the case of nucleic acid expression products, allows the test to be performed utilizing relatively straightforward techniques such as nucleic acid array, and polymerase chain reaction (PCR) processes, or the like, allowing the test to be performed rapidly in a clinical environment.

[0253] Furthermore, producing a single indicator value allows the results of the test to be easily interpreted by a clinician or other medical practitioner, so that test can be used for reliable diagnosis in a clinical environment.

[0254] Processes for generating suitable host response biomarker profiles are described for example in WO 2015/117204, which uses the term “biomarker signature” in place of “biomarker profile” as defined herein. It will be understood, therefore, that terms “biomarker profile” and “biomarker signature” are equivalent in scope. The biomarker profile-generating processes disclosed in WO 2015/117204 provide mechanisms for selecting a combination of biomarkers, and more typically derived biomarkers, that can be used to form a biomarker profile, which in turn can be used in diagnosing the presence, absence or degree of BaSIRS, VaSIRS, PaSIRS or InSIRS. In this regard, the biomarker profile defines the biomarkers that should be measured (i.e., the profile biomarkers), how derived biomarker values should be determined for measured biomarker values, and then how biomarker values should be subsequently combined to generate an indicator value. The biomarker profile can also specify defined indicator value ranges that indicate a particular presence, absence or degree of BaSIRS, VaSIRS, PaSIRS or InSIRS.

[0255] Processes for generating suitable pathogen specific biomarkers for bacteria are described for example in WO 2014/190394. The bacterial pathogen specific biomarkers disclosed in WO 2014/190394 provide mechanisms for selecting a combination of biomarkers that can be used to form a biomarker profile, which in turn can be used in diagnosing the presence, absence or degree of BIP, and for broadly categorizing the type of bacteria detected (if detected). Processes for generating suitable pathogen specific biomarkers for viruses are described herein and in the scientific literature. The virus pathogen specific biomarkers disclosed herein provide mechanisms for selecting a combination of biomarkers that can be used to form a biomarker profile, which in turn can be used in diagnosing the presence, absence or degree of VIP, and for broadly categorizing the type of viruses(s) detected (if detected) and for determining the presence, absence or degree of VIP that can be treated using currently available anti-viral therapies. Processes for generating suitable pathogen specific biomarkers for protozoans are described herein. The protozoan antigen specific biomarkers disclosed herein provide mechanisms for selecting a combination of biomarkers that can be used to form a biomarker profile, which in turn can be used in diagnosing the presence, absence or degree of PIP, and for broadly categorizing the type of protozoan detected (if detected).

[0256] Using the above-described methods a number of host response specific biomarkers have been identified that are particularly useful for assessing a likelihood that a subject has a presence, absence or degree of BaSIRS, VaSIRS, PaSIRS or InSIRS in a subject. Further, using the above-described methods a number of pathogen specific biomarkers have been identified that are particularly useful when combined with host response specific biomarkers for assessing a likelihood that a subject has a presence, absence or degree of bacterial, viral or protozoal infection in a subject. Combinations of host response specific biomarkers and pathogen-specific biomarkers are referred to herein as “compound biomarkers”. As used herein, the term “compound biomarkers” refers to a combination of host response specific biomarkers and at least one pathogen specific biomarker. Generally a host response specific biomarker is a biomarker of the host's immune system, which is altered, or whose level of expression is altered, as part of an inflammatory response to damage or insult resulting from a bacterial, viral or protozoal infection. A pathogen specific biomarker is a molecule or group of molecules of a pathogen, which is specific to a particular category, genus or type of bacteria, virus or protozoan. Compound biomarkers for BaSIRS, VaSIRS, PaSIRS or InSIRS are suitably a combination of both expression products of host genes (also referred to interchangeably herein as “BaSIRS, VaSIRS, PaSIRS or InSIRS biomarker genes”) and pathogen specific biomarkers, including polynucleotide, polypeptide, carbohydrate, lipid, lipopolysaccharide, metabolite. As used herein, polynucleotide expression products of BaSIRS, VaSIRS, PaSIRS or InSIRS biomarker genes are referred to herein as “BaSIRS, VaSIRS, PaSIRS or InSIRS biomarker polynucleotides.” Polypeptide expression products of the BaSIRS, VaSIRS, PaSIRS or InSIRS biomarker genes are referred to herein as “BaSIRS, VaSIRS, PaSIRS or InSIRS biomarker polypeptides.”

[0257] BaSIRS biomarkers are suitably selected from expression products of any one or more of the following BaSIRS genes: ADAM19, ADM, ALPL, CAMK1D, CASS4, CBLL1, CCNK, CD82, CLEC7A, CNNM3, COX15, CR1, DENND3, DOCK5, ENTPD7, EPHB4, EXTL3, FAM129A, FBXO28, FIG. 4, FOXJ3, GAB2, GALNT2, GAS7, GCC2, GRK5, HAL, HCLS1, HK3, ICK, IGFBP7, IK, IKZF5, IL2RB, IMPDH1, INPP5D, ITGA7, JARID2, KIAA0101, KIAA0355, KIAA0907, KLRD1, KLRF1, LAG3, LEPROTL1, LPIN2, MBIP, MCTP1, MGAM, MME, NCOA6, NFIC, NLRP1, NMUR1, NOV, NPAT, OPLAH, PARP8, PCOLCE2, PDGFC, PDS5B, PHF3, PIK3C2A, PLA2G7, POGZ, PRKD2, PRKDC, PRPF38B, PRSS23, PYHIN1, QRICH1, RAB32, RBM15, RBM23, RFC1, RNASE6, RUNX2, RYK, SAP130, SEMA4D, SIDT1, SMPDL3A, SPIN1, ST3GAL2, SYTL2, TGFBR3, TLE3, TLR5, TMEM165, TSPO, UTRN, YPEL1, ZFP36L2, ZHX2. Non-limiting examples of nucleotide sequences for these BaSIRS biomarkers are listed in SEQ ID NOs: 1-94. Non-limiting examples of amino acid sequences for these BaSIRS biomarkers are listed in SEQ ID NOs: 95-188.

[0258] VaSIRS biomarkers are suitably selected from expression products of any one or more of the following VaSIRS genes: ABAT, ABHD2, ABI1, ABLIM1, ACAA1, ACAP2, ACVR1B, AIF1, ALDH3A2, ANKRD49, AOAH, APBB1IP, APLP2, ARAP1, ARHGAP15, ARHGAP25, ARHGAP26, ARHGEF2, ARRB1, ARRB2, ASAP1, ATAD2B, ATF7IP2, ATM, ATP6V1B2, BACH1, BANP, BAZ2B, BCL2, BEX4, BMP2K, BRD1, BRD4, BTG1, C19orf66, C2orf68, CAMK1D, CAMK2G, CAP1, CASC3, CASP8, CBX7, CCND3, CCNG2, CCNT2, CCR7, CD37, CD93, ADGRE5, CDIPT, CEP170, CEP68, CHD3, CHMP1B, CHMP7, CHST11, CIAPIN1, CLEC4A, CLK4, CNPY3, CREB1, CREBBP, CRLF3, CRTC3, CSAD, CSF2RB, CSNK1D, CST3, CTBP2, CTDSP2, CUL1, CYLD, CYTH4, DCP2, DDX60, DGCR2, DGKA, DHX58, DIDO1, DOCK9, DOK3, DPEP2, DPF2, EIF2AK2, EIF3H, EMR2, ERBB2IP, ETS2, FAIM3, FAM134A, FAM65B, FBXO11, FBXO9, FCGRT, FES, FGR, FLOT2, FNBP1, FOXJ2, FOXO1, FOXO3, FRY, FYB, GABARAP, GCC2, GMIP, GNA12, GNAQ, GOLGA7, GPBP1L1, GPR97, GPS2, GPSM3, GRB2, GSK3B, GYPC, HAL, HCK, HERCS, HERC6, HGSNAT, HHEX, HIP1, HPCAL1, HPS1, ICAM3, IFI44, IFI6, IFIH1, IGSF6, IKBKB, IL10RB, IL13RA1, IL16, IL1RAP, IL27RA, IL4R, IL6R, IL6ST, INPP5D, IQSEC1, ISG15, ITGAX, ITGB2, ITPKB, ITSN2, JAK1, KBTBD2, KIAA0232, KIAA0247, KIAA0513, KLF3, KLF6, KLF7, KLHL2, LAP3, LAPTM5, LAT2, LCP2, LDLRAP1, LEF1, LILRA2, LILRB3, LIMK2, LPAR2, LPIN2, LRMP, LRP10, LST1, LTB, LYL1, LYN, LYST, MAML1, MANSC1, MAP1LC3B, MAP3K11, MAP3K3, MAP3K5, MAP4K4, MAPK1, MAPK14, MAPRE2, MARCH7, MARCH8, MARK3, MAST3, MAX, MBP, MCTP2, MED13, MEF2A, METTL3, MKLN1, MKRN1, MMP25, MORC3, MOSPD2, MPPE1, MSL1, MTMR3, MX1, MXI1, MYC, N4BP1, NAB1, NACA, NCBP2, NCOA1, NCOA4, NDE1, NDEL1, NDFIP1, NECAP2, NEK7, NFKB1, NFYA, NLRP1, NOD2, NOSIP, NPL, NR3C1, NRBF2, NSUN3, NUMB, OAS2, OASL, OGFRL1, OSBPL11, OSBPL2, PACSIN2, PAFAH1B1, PARP12, PBX3, PCBP2, PCF11, PCNX, PDCD6IP, PDE3B, PECAM1, PFDNS, PGS1, PHC2, PHF11, PHF2, PHF20, PHF20L1, PHF3, PIAS1, PIK3IP1, PINK1, PISD, PITPNA, PLEKHO1, PLEKHO2, PLXNC1, POLB, POLD4, POLR1D, PPARD, PPM1F, PPP1R11, PPP1R2, PPP2R5A, PPP3R1, PPP4R1, PRKAA1, PRKAG2, PRKCD, PRMT2, PRUNE, PSAP, PSEN1, PSTPIP1, PTAFR, PTEN, PTGER4, PTPN6, PTPRE, PUM2, R3HDM2, RAB11FIP1, RAB14, RAB31, RAB4B, RAB7A, RAF1, RALB, RARA, RASSF2, RBM23, RBMS1, RC3H2, RERE, RGS14, RGS19, RHOG, RIN3, RNASET2, RNF130, RNF141, RNF146, RNF19B, RPL10A, RPL22, RPS6KA1, RPS6KA3, RSAD2, RTN3, RTP4, RXRA, RYBP, SAFB2, SATB1, SEC62, SEMA4D, SERINC3, SERINCS, SERTAD2, SESN1, SETD2, SH2B3, SH2D3C, SIRPA, SIRPB1, SLCO3A1, SMAD4, SNN, SNRK, SNX27, SOAT1, SORL1, SOS2, SP3, SSBP2, SSFA2, ST13, ST3GAL1, STAM2, STAT1, STAT5A, STAT5B, STK38L, STX10, STX3, STX6, SYPL1, TAP1, TFE3, TFEB, TGFBI, TGFBR2, TGOLN2, TIAM1, TLE3, TLE4, TLR2, TM2D3, TMBIM1, TMEM127, TMEM204, TNFRSF1A, TNFSF13, TNIP1, TNK2, TNRC6B, TOPORS, TRAK1, TREM1, TRIB2, TRIMS, TRIOBP, TSC22D3, TYK2, TYROBP, UBE2D2, UBE2L6, UBN1, UBQLN2, UBXN2B, USP10, USP15, USP18, USP4, UTP14A, VAMP3, VAV3, VEZF1, VPS8, WASF2, WBP2, WDR37, WDR47, XAF1, XPC, XP06, YPEL5, YTHDF3, ZBP1, ZBTB18, ZC3HAV1, ZDHHC17, ZDHHC18, ZFAND5, ZFC3H1, ZFYVE16, ZMIZ1, ZNF143, ZNF148, ZNF274, ZNF292, ZXDC, ZYX. Non-limiting examples of nucleotide sequences for these VaSIRS biomarkers are listed in SEQ ID NOs: 189-601. Non-limiting examples of amino acid sequences for these VaSIRS biomarkers are listed in SEQ ID NOs: 602-1013.

[0259] PaSIRS biomarkers are suitably selected from expression products of any one or more of the following PaSIRS genes: ACSL4, ADK, ADSL, AHCTF1, APEX1, ARHGAP17, ARID1A, ARIH2, ASXL2, ATOX1, ATP2A2, ATP6V1B2, BCL11A, BCL3, BCL6, C3AR1, CAMK2G, CCND3, CCR7, CD52, CD55, CD63, CEBPB, CEP192, CHN2, CLIP4, CNOT7, CSNK1G2, CSTB, DNAJC10, EN01, ERLIN1, ETV6, EXOSC10, EXOSC2, EXOSC9, FBL, FBX011, FCER1G, FGR, FLII, FLOT1, FNTA, G6PD, GLG1, GNG5, GPI, GRINA, HCK, HERC6, HLA-DPA1, IL10RA, IMP3, IRF1, IRF8, JUNB, KIF1B, LAP3, LDHA, LY9, METAP1, MGEA5, MLLT10, MYD88, NFIL3, NFKBIA, NOSIP, NUMB, NUP160, PCBP1, PCID2, PCMT1, PGD, PLAUR, PLSCR1, POMP, PREPL, PRKCD, RAB27A, RAB7A, RALB, RBMS1, RITZ, RPL15, RPL22, RPL9, RPS14, RPS4X, RTN4, SEH1L, SERBP1, SERPINB1, SERTAD2, SETX, SH3GLB1, SLAMF7, SOCS3, SORT1, SPI1, SQRDL, STAT3, SUCLG2, TANK, TAP1, TCF4, TCIRG1, TIMP2, TMEM106B, TMEM50B, TNIP1, TOP2B, TPP1, TRAF3IP3, TRIB1, TRIT1, TROVE2, TRPC4AP, TSPO, TTC17, TUBA1B, UBE2L6, UFM1, UPP1, USP34, VAMP3, WARS, WAS, ZBED5, ZMYND11, ZNF266. Non-limiting examples of nucleotide sequences for these PaSIRS biomarkers are listed in SEQ ID NOs: 1014-1143. Non-limiting examples of amino acid sequences for these PaSIRS biomarkers are listed in SEQ ID NOs: 1144-1273.

[0260] InSIRS biomarkers are suitably selected from expression products of any one or more of the following InSIRS genes: ADAM19, ADRBK2, ADSL, AGA, AGPAT5, ANK3, ARHGAP5, ARHGEF6, ARL6IP5, ASCC3, ATP8A1, ATXN3, BCKDHB, BRCC3, BTN2A1, BZW2, C14orf1, CD28, CD40LG, CD84, CDA, CDK6, CDKN1B, CKAP2, CLEC4E, CLOCK, CLUAP1, CPA3, CREB1, CYP4F3, CYSLTR1, DIAPH2, EFHD2, EFTUD1, EIF5B, ENOSF1, ENTPD1, ERCC4, ESF1, EXOC7, EXTL3, FASTKD2, FCF1, FUT8, G3BP1, GAB2, GGPS1, GOLPH3L, HAL, HEATR1, HEBP2, HIBCH, HLTF, HRH4, IDE, IGF2R, IKBKAP, IP07, IQCB1, IQSEC1, KCMF1, KIAA0391, KLHL20, KLHL24, KRIT1, LANCL1, LARP1, LARP4, LRRC8D, MACF1, MANEA, MDH1, METTL5, MLLT10, MRPS10, MT01, MTRR, MXD1, MYH9, MY09A, NCBP1, NEK1, NFX1, NGDN, NIP7, NOL10, NOL8, NOTCH2, NR2C1, PELI1, PEX1, PHC3, PLCL2, POLR2A, PRKAB2, PRPF39, PRUNE, PSMDS, PTGS1, PWP1, RAB11FIP2, RABGAP1L, RAD50, RBM26, RCBTB2, RDX, REPS1, RFC1, RGS2, RIOK2, RMND1, RNF170, RNMT, RRAGC, S100PBP, SIDT2, SLC35A3, SLC35D1, SLCO3A1, SMC3, SMC6, STK17B, SUPT7L, SYNE2, SYT11, TBCE, TCF12, TCF7L2, TFIP11, TGS1, THOC2, TIA1, TLK1, TMEM87A, TNFSF8, TRAPPC2, TRIP11, TTC17, TTC27, VEZT, VNN3, VPS13A, VPS13B, VPS13C, WDR70, XP04, YEATS4, YTHDC2, ZMYND11, ZNF507, ZNF562. Non-limiting examples of nucleotide sequences for these InSIRS biomarkers are listed in SEQ ID NOs: 1274-1424. Non-limiting examples of amino acid sequences for these InSIRS biomarkers are listed in SEQ ID NOs: 1425-1575.

[0261] The present inventors have determined that certain BaSIRS biomarkers have strong diagnostic performance when combined with one or more other BaSIRS biomarkers. In particular, pairs of BaSIRS biomarkers have been identified, each of which forms a BaSIRS derived biomarker combination that is advantageously not a derived biomarker combination for VaSIRS, PaSIRS or InSIRS, and which is thus useful as a BaSIRS indicator of high specificity. Accordingly, in specific embodiments, an indicator is determined that correlates to a derived biomarker value corresponding to a ratio of BaSIRS biomarker values, which can be used in assessing a likelihood of a subject having a presence, absence or degree of BaSIRS. Exemplary BaSIRS derived biomarker combinations are listed in TABLE A.

[0262] It has also been determined that certain VaSIRS biomarkers have strong diagnostic performance when combined with one or more other VaSIRS biomarkers. In particular embodiments, pairs of VaSIRS biomarkers are employed, each of which forms a VaSIRS derived biomarker combination that is advantageously not a derived biomarker combination for BaSIRS, PaSIRS or InSIRS, and which is thus useful as a VaSIRS indicator of high specificity. In non-limiting examples of this type, an indicator is determined that correlates to a derived biomarker value corresponding to a ratio of VaSIRS biomarker values, which can be used in assessing a likelihood of a subject having a presence, absence or degree of VaSIRS. Representative VaSIRS derived biomarker combinations are listed in TABLE B.

[0263] Additionally, certain PaSIRS biomarkers have been identified with strong diagnostic performance when combined with one or more other PaSIRS biomarkers. In certain embodiments, pairs of PaSIRS biomarkers are utilized, each of which forms a VaSIRS derived biomarker combination that is advantageously not a derived biomarker combination for BaSIRS, VaSIRS or InSIRS, and which is useful, therefore, as a PaSIRS indicator of high specificity. Accordingly, in representative examples, an indicator is determined that correlates to a derived biomarker value corresponding to a ratio of PaSIRS biomarker values, which can be used in assessing a likelihood of a subject having a presence, absence or degree of PaSIRS. Non-limiting PaSIRS derived biomarker combinations are listed in TABLE C.

[0264] The present inventors have also determined that certain InSIRS biomarkers have strong diagnostic performance when combined with one or more other InSIRS biomarkers. In particular, pairs of InSIRS biomarkers have been identified, each of which forms an InSIRS derived biomarker combination that is advantageously not a derived biomarker combination for BaSIRS, VaSIRS or PaSIRS, and which is thus useful as a InSIRS indicator of high specificity. Accordingly, in specific embodiments, an indicator is determined that correlates to a derived biomarker value corresponding to a ratio of InSIRS biomarker values, which can be used in assessing a likelihood of a subject having a presence, absence or degree of InSIRS. Exemplary InSIRS derived biomarker combinations are listed in TABLE D.

[0265] In these embodiments, the indicator-determining methods suitably include: (1) determining a pair of SIRS biomarker values, wherein each biomarker value is a value measured for at least one corresponding SIRS biomarker (e.g., BaSIRS, VaSIRS, PaSIRS or InSIRS biomarker) of the subject and is at least partially indicative of a level of the SIRS biomarker in a sample taken from the subject; and (2) combining the biomarker values using a function. The function is suitably selected from multiplication, subtraction, addition or division. In particular embodiments, the function is a division and one member of the pair of host response specific biomarker values is divided by the other member of the pair to provide a ratio of levels of the pair of SIRS biomarkers. Thus, in these embodiments, if the host response SIRS biomarker values denote the levels of a pair of SIRS biomarkers (e.g., BaSIRS, VaSIRS, PaSIRS or InSIRS biomarkers), then the host response SIRS ‘derived biomarker’ values will be based on a ratio of the host response SIRS biomarker values. However, in other embodiments in which the host response SIRS biomarker values represent amplification amounts, or cycle times (e.g., PCR cycle times), which are a logarithmic representation of the level of the SIRS biomarkers within a sample, then the SIRS biomarker values may be combined in some other manner, such as by subtracting the cycle times to determine a host response derived biomarker value indicative of a ratio of the levels of the SIRS biomarkers.

[0266] In specific embodiments, the indicator-determining methods involve: (1) determining a first derived biomarker value using a first pair of host response specific biomarker values that are measured for a corresponding first and second SIRS biomarkers in a sample, wherein the first and second SIRS biomarkers are selected from biomarkers of a single SIRS etiological type (e.g., one of BaSIRS, VaSIRS, PaSIRS or inSIRS biomarkers), the first derived biomarker value being indicative of a ratio of levels of the first and second SIRS biomarkers in the sample, (2) determining a second derived biomarker value using a second pair of host response specific biomarker values that are measured for a corresponding third and fourth SIRS biomarkers in the sample, wherein the third and fourth SIRS biomarkers are selected from SIRS biomarkers of the same etiological type as the first and second SIRS biomarkers, the second derived biomarker value being indicative of a ratio of levels of the third and fourth SIRS biomarkers in the sample; and optionally (3) determining a third derived biomarker value using a third pair of host response specific biomarker values that are measured for a corresponding fifth and sixth SIRS biomarkers in the sample, wherein the fifth and sixth SIRS biomarkers are selected from SIRS biomarkers of a same etiological type as the first and second SIRS biomarkers, the third derived biomarker value being indicative of a ratio of levels of the fifth and sixth SIRS biomarkers in the sample.

[0267] In advantageous embodiments that provide higher levels of specificity for determining the indicator, the indicator-determining methods may further comprise: determining at least one pathogen specific biomarker value, wherein each pathogen specific biomarker value is a value measured for at least one corresponding pathogen specific biomarker (e.g., a BIP, VIP or PIP biomarker) of the subject and is at least partially indicative of a level of the pathogen specific biomarker in the sample. The pathogen to which the pathogen specific biomarker relates is typically one that associates with a SIRS of the same etiological type to which the host response specific biomarkers relate. Representative pathogen specific biomarker values are suitably selected from presence/absence, level, or PCR cycle time, and if positive, to include a descriptor of the pathogen category (e.g., Gram positive or Gram negative, virus type or protozoan species). Thus, the use of BaSIRS biomarkers in the indicator-determining methods of the present invention can be augmented through use of one or more BIP biomarkers to provide host response specific derived BaSIRS biomarker values and at least one BIP biomarker value to thereby determine a compound biomarker value that is at least partially indicative of the presence, absence or degree of BaSIRS. Likewise, the use of VaSIRS biomarkers in the indicator-determining methods of the present invention can be augmented through use of one or more VIP biomarkers to provide host response specific VaSIRS derived biomarker values and at least one VIP biomarker value to thereby determine a compound biomarker value that is at least partially indicative of the presence, absence or degree of VaSIRS. Similarly, the use of PaSIRS biomarkers in the indicator-determining methods of the present invention can be augmented through use of one or more PIP biomarkers to provide host response specific PaSIRS derived biomarker values and at least one PIP biomarker value to thereby determine a compound biomarker value that is at least partially indicative of the presence, absence or degree of PaSIRS.

[0268] Typically the pathogen specific biomarkers belong to pathogens associated with the development or progression of SIRS. A limited number of microorganisms (bacteria, viruses, protozoans) cause disease in humans, with only few causing the majority of infectious diseases, even fewer causing SIRS, and still even fewer number causing bacteremia, viremia or protozoan parasitemia. TABLE 1 lists common bacterial, viral and protozoal pathogens associated with human BaSIRS, VaSIRS and PaSIRS that can also be found in peripheral blood (in whole or part), respectively. Such pathogens have multiple methods of interacting with the host and its cells and if a host mounts a systemic inflammatory response to an infection it means that the immune system has been exposed to sufficient levels of novel pathogen molecules. Representative types of pathogen molecules that can elicit a systemic inflammatory response include proteins, nucleic acids (RNA and/or DNA), lipoproteins, lipoteichoic acid and lipopolysaccharides, many of which can be detected (and typed) circulating in blood at some stage during the disease pathogenesis.

[0269] Molecular nucleic acid-based tests have been developed to detect the major sepsis-causing bacterial pathogens in whole blood from patients with suspected sepsis (e.g., SeptiFast® from Roche, Iridica® from Abbott, Sepsis Panel from Biofire (Biomerieux), Prove-it® Sepsis from Mobidiag). Reference also can be made to U.S. Pat. Appl. Pub. No. 2016/0032364, which discloses methods of detecting and distinguishing a myriad of bacterial species through detection of 16S ribosomal ribonucleic acid (rRNA) using antisense probes. An alternative method is disclosed in U.S. Pat. Appl. Pub. No. 2014/0249037, which characterizes bacteria by amplifying bacterial 16S rRNA and characterizing the bacteria based on the 16S rRNA gene sequence.

[0270] In specific embodiments, bacterial pathogen Gram status (i.e., Gram-positive or Gram-negative) is detected using methods and kits disclosed in U.S. Pat. Appl. Pub. No. 2016/0145696, which is incorporated herein by reference, through interrogation of polymorphisms at nucleotide positions of bacterial 16S rRNA that correspond to positions 396 and 398 of the Escherichia coli 16S rRNA gene. Positions corresponding to positions 396 and 398 of SEQ ID NO:1576 in any prokaryotic 16S rRNA gene (or 16S rRNA molecule or DNA copy thereof) are readily identifiable by alignment with the E. coli 16S rRNA gene set forth in SEQ ID NO:1576. The general rules for differentiating Gram-positive and Gram-negative bacteria that can cause BaSIRS using these two pathogen biomarker SNP molecules are depicted in TABLE E.

TABLE E

| Gram Status | SNP 396 | SNP 398 |
|---|---|---|
| Negative | C | T/A/C |
| Positive | A/T/G | C |

[0271] Thus, the pathogen biomarker SNPs in TABLE E provide the means for determining the Gram status of a bacterium in a sample by analyzing nucleic acid from the sample for SNPs in the 16S rRNA gene (or 16S rRNA or DNA copy thereof) at positions corresponding to positions 396 and 398 of the 16S rRNA gene set forth in SEQ ID NO:1576, wherein a C at position 396 and a T, A or C at position 398 indicates that the bacterium in the sample is a Gram-negative bacterium; and an A, T or G at position 396 and a C at position 398 indicates that the bacterium is a Gram-positive bacterium. Bacteria that can be classified as Gram-positive or Gram-negative using SNPs at positions corresponding to 396 and 398 of the E. coli 16S rRNA gene set forth in SEQ ID NO:1576 include, for example, Acinetobacter spp., Actinobacillus spp., Actinomadura spp., Actinomyces spp., Actinoplanes spp., Aeromonas spp., Agrobacterium spp., Alistipes spp., Anaerococcus spp., Arthrobacter spp., Bacillus spp., Brucella spp., Bulleidia spp., Burkholderia spp., Cardiobacterium spp., Citrobacter spp., Clostridium spp., Corynebacterium spp., Dermatophilus spp., Dorea spp., Edwardsiella spp., Enterobacter spp., Enterococcus spp., Erysipelothrix spp., Escherichia spp., Eubacterium spp., Faecalibacterium spp., Filifactor spp., Finegoldia spp., Flavobacterium spp., Gallicola spp., Haemophilus spp., Helcococcus spp., Holdemania spp., Hyphomicrobium spp., Klebsiella spp., Lactobacillus spp., Legionella spp., Listeria spp., Methylobacterium spp., Micrococcus spp., Micromonospora spp., Mobiluncus spp., Moraxella spp., Morganella spp., Mycobacterium spp., Neisseria spp., Nocardia spp., Paenibacillus spp., Parabacteroides spp., Pasteurella spp., Entomophile's spp., Peptostreptococcus spp., Planococcus spp., Planomicrobium spp., Plesiomonas spp., Porphyromonas spp., Prevotella spp., Propionibacterium spp., Proteus spp., Providentia spp., Pseudomonas spp., Ralstonia spp., Rhodococcus spp., Roseburia spp., Ruminococcus spp., Salmonella spp., Sedimentibacter spp., Serratia spp., Shigella spp., Solobacterium spp., Sphingomonas spp., Sporanaerobacter spp., Staphylococcus spp., Stenotrophomonas spp., Streptococcus spp., Streptomyces spp., Tissierella spp., Vibrio spp., and Yersinia spp. Accordingly, in instances in which the pathogen specific biomarker is a bacterial biomarker, the biomarker is preferably a 16S rRNA gene, more preferably polymorphisms at nucleotide positions of bacterial 16S rRNA that correspond to positions 396 and 398 of the Escherichia coli 16S rRNA gene, which can be used to provide the Gram status of a bacterial pathogen.

[0272] For virus detection, numerous sensitive and specific assays are available in the art. For example, amplification of viral DNA and RNA (e.g., PCR) as well as viral antigen detection assays are known that are rapid and do not require lengthy incubation periods needed for viral isolation in cell cultures. To cover the possibility of a mixed infection, as well as to cover multiple possible viral causes or strains, there are commercially available assays capable of detecting more than one virus and/or strain at a time (e.g., BioMerieux, BioFire, FilmArray®, Respiratory Panel; Luminex, xTAG® Respiratory Viral Panel). Further, there are techniques that allow for amplification of viral DNA of unknown sequence which could be useful in situations where the clinical signs are generalized, for viruses with high mutation rates, for new and emerging viruses, or for detecting biological weapons of man-made nature (Clem et al., Virol J 4: 65, 2007; Liang et al., Science 257(5072:967-971), 1992; Nie X et al., J Virol Methods 91(1):37-49, 2001; Ralph et al., Proc Natl Acad Sci USA 90(22):10710-10714, 1993). Further, a microarray has been designed to detect every known virus for which there is DNA sequence information in GenBank (called “Virochip”) (Greninger et al., PLoS ONE, 5(10), e13381, 2010; Chiu et al., Proc Natl Acad Sci USA 105: 14124-14129, 2008).

[0273] In some instances, detection of host antibodies to an infecting virus remains the diagnostic gold standard, because either the virus cannot be grown, or the presence of virus in a biological fluid is transient (e.g., arboviral infections) and therefore cannot be detected at times when the patient is symptomatic. In some instances the ratio of IgM to IgG antibodies can be used to determine the recency of virus infection. IgM is usually produced early in the immune response and is non-specific, whereas IgG is produced later in the immune response and is specific. Examples of the use of this approach include the diagnosis of hepatitis E (Tripathy et al., PLoS ONE, 7(2), e31822, 2012), dengue (SA-Ngasang et al., Epidemiology and Infection, 134(04), 820, 2005), and Epstein-Barr Virus (Hess, R. D. Journal of Clinical Microbiology, 42(8), 3381-3387, 2004).

[0274] In specific embodiments, viruses that are capable of causing pathology in humans, as for example those listed in TABLE 1, which are capable of causing SIRS, and cause a viremia are detected and/or quantified using any suitable nucleic acid detection and/or amplification assay, with oligonucleotide primers and/or probes listed in TABLE F.

TABLE F

| Reagent | 5′-3′ Sequence | SEQ ID NO. | Virus Detected |
|---|---|---|---|
| Forward (F) | CATC/TCTGTTGTATATGAGGCCCAT | 1577 | Influenza A |
| Reverse (R) | GGACTGCAGCGTAGACGCTT | 1578 | Influenza A |
| Probe (P) | CTCAGTTATTCTGCTGGTGCACTTGCCA | 1579 | Influenza A |
| F | AAATACGGTGGATTAAATAAAAGCAA | 1580 | Influenza B |
| R | CCAGCAATAGCTCCGAAGAAA | 1581 | Influenza B |
| P | CACCCATATTGGGCAATTTCCTATGGC | 1582 | Influenza B |
| F | ATCCCTACAATCCCCAAAGTCAAGGAGT | 1583 | HIV-1 |
| R | CCTGCACTGTACCCCCCAATCC | 1584 | HIV-1 |
| P | ACAGCAGTACAAATGGCA | 1585 | HIV-1 |
| F | ACTGATGGCAGTTCATTGCATGAATTTTAAAAG | 1586 | HIV-2 |
| R | GGCCATTGTTTAACTTTTGGGCCATCCA | 1587 | HIV-2 |
| P | ATAAGCCCCATAGCC | 1588 | HIV-2 |
| F | GGACCCCTGCTCGTGTTACA | 1589 | HBV |
| R | GAGAGAAGTCCACCMCGAGTCTAG | 1590 | HBV |
| P | TGTTGACAARAATCCTCACCATACCRCAGA | 1591 | HBV |
| F | GTGGTCTGCGGAACCGGTGA | 1592 | HCV |
| R | CGCAAGCACCCTATCAGGCAGT | 1593 | HCV |
| P | CCGAGTAGTGTTGGGTCGCGAAAGG | 1594 | HCV |
| F-HSV-1 | GCAGTTTACGTACAACCACATACAGC | 1595 | HSV-1 |
| F-HSV-2 | TGCAGTTTACGTATAACCACATACAGC | 1596 | HSV-2 |
| R | AGCTTGCGGGCCTCGTT | 1597 | HSV-1/2 |
| P-HSV-1 | CGGCCCAACATATCGTTGACATGGC | 1598 | HSV-1 |
| P-HSV-2 | CGCCCCAGCATGTCGTTCACGT | 1599 | HSV-2 |
| F | AACAGATGTAAGCAGCTCCGTTATC | 1600 | RSV |
| R | CGATTTTTATTGGATGCTGTACATTT | 1601 | RSV |
| P | TGCCATAGCATGACACAATGGCTCCT | 1602 | RSV |
| F | TCCTCCGGCCCCTGAAT | 1603 | Rhinovirus |
| R | GAAACACGGACACCCAAAGTAGT | 1604 | Rhinovirus |
| P | YGGCTAACCTWAACCC | 1605 | Rhinovirus |
| F | CCGCTCCTACCTGCAATATCA | 1606 | EBV |
| R | GGAAACCAGGGAGGCAAATG | 1607 | EBV |
| P | TGCAGCTTTGACGATGG | 1608 | EBV |
| F | GCTGACGCGTTTGGTCATC | 1609 | CMV |
| R | ACGATTCACGGAGCACCAG | 1610 | CMV |
| P | TCGGCGGATCACCACGTTCG | 1611 | CMV |
| F | TCGAAATAAGCATTAATAGGCACACT | 1612 | HHV6 |
| R | CGGAGTTAAGGCATTGGTTGA | 1613 | HHV6 |
| P | CCAAGCAGTTCCGTTTCTCTGAGCCA | 1614 | HHV6 |
| F | CASRGTGATCAAARTGRRARYGAGCT | 1615 | Measles |
| R | CCTGCCATGGYYTGCA | 1616 | Measles |
| P | TCYGATRCAGTRTCAAT | 1617 | Measles |
| F | TCAGCGATCTCTCCACCAAAG | 1618 | WNV |
| R | GGGTCAGCACGTTTGTCATTG | 1619 | WNV |
| P | TGCCCGACCATGGGAGAAGCTC | 1620 | WNV |
| F | ACWCARHTVAAYYTNAARTAYGC | 1621 | Coronavirus |
| R | TCRCAYTTDGGRTARTCCA | 1622 | Coronavirus |
| F | GCACAGCCACGTGACGAA | 1623 | Bocavirus |
| R | TGGACTCCCTTTTCTTTTGTAGGA | 1624 | Bocavirus |
| P | TGAGCTCAGGGAATATGAAAGACAAGCATC | 1625 | Bocavirus |
| F | CCCTGAATGCGGCTAATCC | 1626 | Enterovirus |
| R | ATTGTCACCATAAGCAGCCA | 1627 | Enterovirus |
| P | AACCGACTACTTTGGGTGTCCGTGTTTC | 1628 | Enterovirus |
| F | TTCCAGCATAATAACTCWGGCTTTG | 1629 | Adenovirus |
| R | AATTTTTTCTGWGTCAGGCTTGG | 1630 | Adenovirus |
| P | CCATACCCCCTTATTGG | 1631 | Adenovirus |
| F | CAGTGGTTGATGCTCAAGATGGA | 1632 | Rotavirus |
| R | TCATTGTAATCATATTGAATCCCCA | 1633 | Rotavirus |
| P | ACAACTGCAGCTTCAAAAGAAGWGT | 1634 | Rotavirus |
| F | TCAATATGCTGAAACGCGCGAGAAACCG | 1635 | Dengue |
| R | TTGCACCAACAGTCAATGTCTTCAGGTTC | 1636 | Deng ue |
| P | GAAGAATGGAGCGATCAAAGTG | 1637 | Dengue |
| F | GTAACASWWGCCTCTGGGSCCAAAAG | 1638 | Parechovirus |
| R | GGCCCCWGRTCAGATCCAYAGT | 1639 | Parechovirus |
| P | CCTRYGGGTACCTYCWGGGCATCCTTC | 1640 | Parechovirus |
| F | AGTCTTTAGGGTCTTCTACCTT | 1641 | BK virus |
| R | GGTGCCAACCTATGGAACAG | 1642 | BK virus |
| P | TCATCACTGGCAAACAT | 1643 | BK virus |
| F | ACAGGAATTGGCTCAGATATGYG | 1644 | Parainfluenza |
| R | GACTTCCCTATATCTGCACATCCTTGAGTG | 1645 | Parainfluenza |
| P | ACCATGCAGACGGC | 1646 | Parainfluenza |
| F | CACTTCCGAATGGCTGA | 1647 | TTV |
| R | GCCTTGCCCATAGCCCGC | 1648 | TTV |
| P | TCCCGAGCCCGAATTGCCCCT | 1649 | TTV |
| F | GAACCATCACTCCACAGAGGAG | 1650 | Coxsackie |
| R | GTACCTGTGGTGGGCATTG | 1651 | Coxsackie |
| P | CAGCCATTGGGAATTTCTTTAGCCGTG | 1652 | Coxsackie |
| F | TGGCCCATTTTCAAGGAAGT | 1653 | Parvo B19 |
| R | CTGAAGTCATGCTTGGGTATTTTTC | 1654 | Parvo B19 |
| P | CCGGAAGTTCCCGCTTACAAC | 1655 | Parvo B19 |

[0275] Current diagnosis of protozoal infections is achieved by pathogen detection using a variety of methods including light microscopy, or antigen or nucleic acid detection using different techniques such as tissue biopsy and histology, fecal or blood smears and staining, ELISA, lateral flow immunochromatography, and nucleic acid amplification. Common protozoan human pathogens, which can be detected using these techniques, include Plasmodium (malaria), Leishmania (leishmaniasis), Trypanosoma (sleeping sickness and Chagas disease), Cryptosporidium, Giardia, Toxoplasma, Babesia, Balantidium and Entamoeba. Common and well-known protozoan human pathogens that can be found in peripheral blood (causing a parasitemia—see TABLE 1 for a list) include Plasmodium falciparum, Plasmodium ovale, Plasmodium malariae, Plasmodium vivax, Leishmania donovani, Trypanosoma brucei, Trypanosoma cruzi, Toxoplasma gondii and Babesia microti.

[0276] In specific embodiments, protozoans that are capable of causing pathology in humans, as for example those listed in TABLE 1, which are capable of causing SIRS and cause a parasitemia are detected and/or quantified using any suitable nucleic acid detection and/or amplification assay, with oligonucleotide primers and/or probes in TABLE G.

TABLE G

| Reagent | 5′-3′ Sequence | SEQ ID NO. | Organisms Detected |
|---|---|---|---|
| Forward (F) | TTTCATTAATCAAGAACGAAAGTTAGGGG | 1656 | Toxoplasma gondii and |
| | | | Babesia microti |
| F2 | TTCCATTAATCAAGAACGAAAGTTAAGGG | 1657 | Plasmodium ovale, |
| | | | falciparum, malariae, vivax |
| F3 | AAACGATGACACCCATGAATTGGGGA | 1658 | Trypanosoma cruzi, brucei |
| | | | and Leishmania donovani |
| Probe (Pr) | CGTAGTCCTAACCATAAAC | 1659 | Babesia microti |
| Pr2 | AAACTATGCCGACTAGG | 1660 | Plasmodium ovale, |
| | | | falciparum, malariae, vivax |
| Pr3 | GACTTCTCCTGCACCTTAT | 1661 | Toxoplasma gondii |
| Pr4 | ACGGGAATATCCTCAGCACGTT | 1662 | Trypanosoma cruzi, brucei |
| | | | and Leishmania donovani |
| Reverse (R) | TCAAAGTCTTTGGGTTCTGGGGGG | 1663 | Toxoplasma gondii and |
| | | | Babesia microti |
| R2 | TCAAAGTCTTTGGGTTCTGGGGCG | 1664 | Plasmodium ovale, |
| | | | falciparum, malariae, vivax |
| R3 | CGTTCGCAAGAGTGAAACTTAAAG | 1665 | Trypanosoma cruzi, brucei |
| | | | and Leishmania donovani |

[0277] The indicator-determining methods of the present invention typically include obtaining a sample from a subject that typically has at least one clinical sign of SIRS. The sample typically comprises a biological fluid and in preferred embodiments comprises blood, suitably peripheral blood. The sample will typically include one or more BaSIRS, VaSIRS, PaSIRS or InSIRS biomarkers (e.g., polynucleotide or polypeptide expression products of BaSIRS, VaSIRS, PaSIRS or InSIRS genes) and none, one or more BIP, VIP or PIP biomarkers, quantifying at least two (e.g., 2, 3, 4, 5, 6, 7, 8, 9, 10 or more) of the BaSIRS, VaSIRS, PaSIRS or InSIRS host response specific biomarkers and optionally quantifying at least one (e.g., 1, 2, 3, 4, 5, 6, 7, 8, 9, 10 or more) of the BIP, VIP or PIP pathogen specific biomarkers) within the sample to determine biomarker values. This can be achieved using any suitable technique, and will depend on the nature of the BaSIRS, VaSIRS, PaSIRS, InSIRS, BIP, VIP or PIP biomarkers. Suitably, a BaSIRS, VaSIRS, PaSIRS or InSIRS host response specific biomarker value corresponds to the level of a respective BaSIRS, VaSIRS, PaSIRS or InSIRS biomarkers or to a function that is applied to that level. Suitably, an individual measured BIP, VIP or PIP pathogen specific biomarker value corresponds to the level of a respective BIP, VIP or PIP biomarker or to a function that is applied to that level or amount.

[0278] The host response specific derived biomarker values can be used alone or in combination with the at least one pathogen specific biomarker value to at least partially determine the indicator. For example, the indicator may be determined directly simply by combining the host response specific derived biomarker values using a combining function. Alternatively, the host response specific derived biomarker values and the at least one pathogen specific biomarker value are combined using a combining function to provide a compound biomarker value that is used to directly determine the indicator. In other embodiments, the host response specific derived biomarker values and optionally the at least one pathogen specific biomarker value are subjected to further processing, such as comparing the derived biomarker value to a reference, or using a cut-off value for pathogen specific biomarker, or the like, as will be described in more detail below, for determining the indicator. In certain of these embodiments, the indicator-determining methods additionally involve: combining the at least one pathogen specific biomarker value and the first, second and optionally third host response specific derived biomarker values using a combining function to provide a compound biomarker value and determining the indicator based at least in part on the compound biomarker value. Thus, in these embodiments, two or more pairs of host response specific derived biomarker values can be used in combination with one or more pathogen specific biomarker values, to provide a compound biomarker value that can assist in increasing the ability of the indicator to reliably determine the likelihood of a subject having, or not having, BaSIRS, VaSIRS, PaSIRS or InSIRS.

[0279] As disclosed herein, a combination of host response specific derived biomarker values and optionally at least one pathogen specific biomarker value can be combined using a combining function such as an additive model; a linear model; a support vector machine; a neural network model; a random forest model; a regression model; a genetic algorithm; an annealing algorithm; a weighted sum; a nearest neighbor model; and a probabilistic model. Various combinations of host response derived biomarkers and pathogen specific biomarkers are envisaged.

[0280] In some embodiments, the indicator is compared to an indicator reference, with a likelihood being determined in accordance with results of the comparison. The indicator reference may be derived from indicators determined for a number of individuals in a reference population. The reference population typically includes individuals having different characteristics, such as a plurality of individuals of different sexes; and/or ethnicities, with different groups being defined based on different characteristics, with the subject's indicator being compared to indicator references derived from individuals with similar characteristics. The reference population can also include a plurality of healthy individuals, a plurality of individuals suffering from BaSIRS, VaSIRS, PaSIRS or InSIRS, a plurality of individuals showing clinical signs of BaSIRS, VaSIRS, PaSIRS or InSIRS, and/or first and second groups of individuals, each group of individuals suffering from a respective diagnosed SIRS.

[0281] The indicator can also be used for determining a likelihood of the subject having a first or second condition, wherein the first condition is BaSIRS, VaSIRS, PaSIRS or InSIRS and the second condition is a healthy condition; in other words to distinguish between these conditions. In this case, this would typically be achieved by comparing the indicator to first and second indicator references, the first and second indicator references being indicative of first and second conditions and determining the likelihood in accordance with the results of the comparison. In particular, this can include determining first and second indicator probabilities using the results of the comparisons and combining the first and second indicator probabilities, for example using a Bayes method, to determine a condition probability corresponding to the likelihood of the subject having one of the conditions. In this situation the first and second conditions could include BaSIRS, VaSIRS, PaSIRS or InSIRS, or BaSIRS, VaSIRS, PaSIRS or InSIRS and a healthy condition. In this case, the first and second indicator references are distributions of indicators determined for first and second groups of a reference population, the first and second group consisting of individuals diagnosed with the first or second condition respectively.

[0282] In specific embodiments, the indicator-determining methods of the present invention are performed using at least one electronic processing device, such as a suitably programmed computer system or the like. In this case, the electronic processing device typically obtains at least one pair of measured host response specific biomarker values, and at least one pathogen specific biomarker value, either by receiving these from a measuring or other quantifying device, or by retrieving these from a database or the like. The processing device then determines a first derived biomarker value indicative of a ratio of levels of first and second host response specific biomarkers in a sample under test. In some embodiments, the processing device determines a second derived biomarker value indicative of a ratio of levels of third and fourth host response specific biomarkers, and optionally a third derived biomarker value indicative of a ratio of levels of fifth and sixth host response specific biomarkers in the sample. In its simplest form, the processing device may at least partially determine the indicator using only the first host response specific derived biomarker value. In other embodiments, the processing device combines the first host response specific derived biomarker value and the at least one pathogen specific biomarker value to provide a compound biomarker value that is used to at least partially determine the indicator. In still other embodiments, the processing device combines the first host response specific derived biomarker value, the second host response specific derived biomarker value, and optionally the third host response specific derived biomarker value to provide a combined derived biomarker value that is used to at least partially determine the indicator. In further embodiments, the processing device combines the first host response specific derived biomarker value, the second host response specific derived biomarker value, and optionally the third host response specific derived biomarker value and the at least one pathogen specific biomarker value to provide a compound derived biomarker value that is used to at least partially determine the indicator.

[0283] The processing device can then generate a representation of the indicator, for example by generating an alphanumeric indication of the indicator, a graphical indication of a comparison of the indicator to one or more indicator references or an alphanumeric indication of a likelihood of the subject having at least one medical condition.

[0284] The indicator-determining methods of the present invention are based on determining the level of individual host response specific biomarkers and optionally pathogen specific biomarkers to thereby determine their biomarker values. It should be understood, however, that a biomarker level does not need to be an absolute amount of biomarker. Instead, biomarker levels may correspond for example to a relative amount or concentration of a biomarker as well as any value or parameter which correlates thereto or can be derived therefrom. For example, in some embodiments of the indicator-determining methods, which employ a pair of host response specific biomarker polynucleotides and at least one pathogen specific biomarker polynucleotide, the methods may involve quantifying the host response specific biomarker polynucleotides and the at least one pathogen specific biomarker polynucleotide for example by nucleic acid amplification (e.g., by PCR) of the host response specific biomarker polynucleotides and the at least one pathogen specific polynucleotide in the sample, determining an amplification amount representing a degree of amplification required to obtain a defined level of each of the pair of host response specific biomarker polynucleotides and of the at least one pathogen specific polynucleotide and determining the indicator by first determining a difference between the amplification amounts of the pair of host response specific biomarker polynucleotides to provide a difference amplification amount and then combining the difference amplification amount and the amplification amount of the pathogen specific polynucleotide to thereby determine an indicator value that is at least partially indicative of the presence, absence or degree of the corresponding SIRS condition under test. In this regard, the amplification amount is generally a cycle time, a number of cycles, a cycle threshold and an amplification time.

[0285] Accordingly, in some embodiments, the methods may broadly comprise: determining a host response specific derived biomarker value by determining a difference between the amplification amounts of a first pair of host response specific biomarker polynucleotides; determining at least one pathogen specific biomarker value; and determining the indicator by combining the host response specific derived biomarker value and then the at least one pathogen specific biomarker value. In further illustrations of these embodiments, the methods may include: determining a first host response specific derived biomarker value by determining a difference between the amplification amounts of a first pair of host response specific biomarker polynucleotides; determining a second host response specific derived biomarker value by determining a difference between the amplification amounts of a second pair of host response specific biomarker polynucleotides; optionally determining a third host response specific derived biomarker value by determining a difference between the amplification amounts of a third pair of host response specific biomarker polynucleotides; determining at least one pathogen specific biomarker value; and determining the indicator by adding the first, second and/or third derived biomarker values to provide a combined derived biomarker value and combining the combined derived biomarker value and the pathogen specific biomarker value(s) to thereby determine an indicator value that is at least partially indicative of the presence, absence or degree of the corresponding SIRS condition under test.

[0286] In some embodiments, the presence, absence or degree of BaSIRS, VaSIRS, PaSIRS or InSIRS in a subject is established by determining one or more of BaSIRS, VaSIRS, PaSIRS or InSIRS host response specific biomarker values, wherein individual BaSIRS, VaSIRS, PaSIRS or InSIRS biomarker values are indicative of a value measured or derived for a BaSIRS, VaSIRS, PaSIRS or InSIRS biomarker in a subject or in a sample taken from the subject. These biomarkers are referred to herein as “sample BaSIRS, VaSIRS, PaSIRS or InSIRS biomarkers”. In accordance with the present invention, a sample BaSIRS, VaSIRS, PaSIRS or InSIRS biomarker corresponds to a reference BaSIRS, VaSIRS, PaSIRS or InSIRS biomarker (also referred to herein as a “corresponding BaSIRS, VaSIRS, PaSIRS or InSIRS biomarker”). By “corresponding BaSIRS, VaSIRS, PaSIRS or InSIRS biomarker” is meant a BaSIRS, VaSIRS, PaSIRS or InSIRS biomarker that is structurally and/or functionally similar to a reference BaSIRS, VaSIRS, PaSIRS or InSIRS biomarker as set forth for example in SEQ ID NOs: 1-1575. Representative corresponding BaSIRS, VaSIRS, PaSIRS or InSIRS biomarkers include expression products of allelic variants (same locus), homologues (different locus), and orthologues (different organism) of reference BaSIRS, VaSIRS, PaSIRS or InSIRS biomarker genes. Nucleic acid variants of reference BaSIRS, VaSIRS, PaSIRS or InSIRS biomarker genes and encoded BaSIRS, VaSIRS, PaSIRS or InSIRS biomarker polynucleotide expression products can contain nucleotide substitutions, deletions, inversions and/or insertions. Variation can occur in either or both the coding and non-coding regions. The variations can produce both conservative and non-conservative amino acid substitutions (as compared in the encoded product). For nucleotide sequences, conservative variants include those sequences that, because of the degeneracy of the genetic code, encode the amino acid sequence of a reference BaSIRS, VaSIRS, PaSIRS or InSIRS polypeptide.

[0287] Generally, variants of a particular BaSIRS, VaSIRS, PaSIRS or InSIRS biomarker gene or polynucleotide will have at least about 40%, 45%, 50%, 51%, 52%, 53%, 54%, 55%, 56%, 57%, 58%, 59% 60%, 61%, 62%, 63%, 64%, 65%, 66%, 67%, 68%, 69% 70%, 71%, 72%, 73%, 74%, 75%, 76%, 77%, 78%, 79%, 80%, 81%, 82%, 83%, 84%, 85%, 86%, 87%, 88%, 89%, 90%, 91%, 92%, 93%, 94%, 95%, 96%, 97%, 98%, 99% or more sequence identity to that particular nucleotide sequence as determined by sequence alignment programs known in the art using default parameters. In some embodiments, the BaSIRS, VaSIRS, PaSIRS or InSIRS biomarker gene or polynucleotide displays at least about 40%, 45%, 50%, 51%, 52%, 53%, 54%, 55%, 56%, 57%, 58%, 59% 60%, 61%, 62%, 63%, 64%, 65%, 66%, 67%, 68%, 69% 70%, 71%, 72%, 73%, 74%, 75%, 76%, 77%, 78%, 79%, 80%, 81%, 82%, 83%, 84%, 85%, 86%, 87%, 88%, 89%, 90%, 91%, 92%, 93%, 94%, 95%, 96%, 97%, 98%, 99% or more sequence identity to a nucleotide sequence selected from any one of SEQ ID NO: 1-94, 189-601, 1014-1143 and 1274-1424, as summarized in TABLES 3, 5, 7 and 9.

[0288] Corresponding BaSIRS, VaSIRS, PaSIRS or InSIRS biomarkers also include amino acid sequences that display substantial sequence similarity or identity to the amino acid sequence of a reference BaSIRS, VaSIRS, PaSIRS or InSIRS biomarker polypeptide. In general, an amino acid sequence that corresponds to a reference amino acid sequence will display at least about 50, 51, 52, 53, 54, 55, 56, 57, 58, 59, 60, 61, 62, 63, 64, 65, 66, 67, 68, 69, 70, 71, 72, 73, 74, 75, 76, 77, 78, 79, 80, 81, 82, 83, 84, 85, 86, 97, 88, 89, 90, 91, 92, 93, 94, 95, 96, 97, 98, 99% or even up to 100% sequence similarity or identity to a reference amino acid sequence selected from any one of SEQ ID NO: 95-188, 602-103, 1144-1273 and 1425-1575, as summarized in TABLES 4, 6, 8 and 10.

[0289] In some embodiments, calculations of sequence similarity or sequence identity between sequences are performed as follows:

[0290] To determine the percentage identity of two amino acid sequences, or of two nucleic acid sequences, the sequences are aligned for optimal comparison purposes (e.g., gaps can be introduced in one or both of a first and a second amino acid or nucleic acid sequence for optimal alignment and non-homologous sequences can be disregarded for comparison purposes). In some embodiments, the length of a reference sequence aligned for comparison purposes is at least 30%, usually at least 40%, more usually at least 50%, 60%, and even more usually at least 70%, 80%, 90%, 100% of the length of the reference sequence. The amino acid residues or nucleotides at corresponding amino acid positions or nucleotide positions are then compared. When a position in the first sequence is occupied by the same amino acid residue or nucleotide at the corresponding position in the second sequence, then the molecules are identical at that position. For amino acid sequence comparison, when a position in the first sequence is occupied by the same or similar amino acid residue (i.e., conservative substitution) at the corresponding position in the second sequence, then the molecules are similar at that position.

[0291] The percentage identity between the two sequences is a function of the number of identical amino acid residues shared by the sequences at individual positions, taking into account the number of gaps, and the length of each gap, which need to be introduced for optimal alignment of the two sequences. By contrast, the percentage similarity between the two sequences is a function of the number of identical and similar amino acid residues shared by the sequences at individual positions, taking into account the number of gaps, and the length of each gap, which need to be introduced for optimal alignment of the two sequences.

[0292] The comparison of sequences and determination of percentage identity or percentage similarity between sequences can be accomplished using a mathematical algorithm. In certain embodiments, the percentage identity or similarity between amino acid sequences is determined using the Needleman and Wunsch, (1970, J. Mol. Biol. 48: 444-453) algorithm which has been incorporated into the GAP program in the GCG software package (available at http://www.gcg.com), using either a Blossum 62 matrix or a PAM250 matrix, and a gap weight of 16, 14, 12, 10, 8, 6, or 4 and a length weight of 1, 2, 3, 4, 5, or 6. In specific embodiments, the percent identity between nucleotide sequences is determined using the GAP program in the GCG software package (available at http://www.gcg.com), using a NWSgapdna.CMP matrix and a gap weight of 40, 50, 60, 70, or 80 and a length weight of 1, 2, 3, 4, 5, or 6. An non-limiting set of parameters (and the one that should be used unless otherwise specified) includes a Blossum 62 scoring matrix with a gap penalty of 12, a gap extend penalty of 4, and a frameshift gap penalty of 5.

[0293] In some embodiments, the percentage identity or similarity between amino acid or nucleotide sequences can be determined using the algorithm of E. Meyers and W. Miller (1989, Cabios, 4: 11-17) which has been incorporated into the ALIGN program (version 2.0), using a PAM120 weight residue table, a gap length penalty of 12 and a gap penalty of 4.

[0294] The nucleic acid and protein sequences described herein can be used as a “query sequence” to perform a search against public databases to, for example, identify other family members or related sequences. Such searches can be performed using the NBLAST and XBLAST programs (version 2.0) of Altschul, et al., (1990, J Mol Biol., 215: 403-10). BLAST nucleotide searches can be performed with the NBLAST program, score=100, wordlength=12 to obtain nucleotide sequences homologous to 53010 nucleic acid molecules of the invention. BLAST protein searches can be performed with the XBLAST program, score=50, wordlength=3 to obtain amino acid sequences homologous to protein molecules of the invention. To obtain gapped alignments for comparison purposes, Gapped BLAST can be utilized as described in Altschul et al., (1997, Nucleic Acids Res, 25: 3389-3402). When utilizing BLAST and Gapped BLAST programs, the default parameters of the respective programs (e.g., XBLAST and NBLAST) can be used.

[0295] Corresponding BaSIRS, VaSIRS, PaSIRS or InSIRS biomarker polynucleotides also include nucleic acid sequences that hybridize to reference BaSIRS, VaSIRS, PaSIRS or InSIRS biomarker polynucleotides, or to their complements, under stringency conditions described below. As used herein, the term “hybridizes under low stringency, medium stringency, high stringency, or very high stringency conditions” describes conditions for hybridization and washing. “Hybridization” is used herein to denote the pairing of complementary nucleotide sequences to produce a DNA-DNA hybrid or a DNA-RNA hybrid. Complementary base sequences are those sequences that are related by the base-pairing rules. In DNA, A pairs with T and C pairs with G. In RNA, U pairs with A and C pairs with G. In this regard, the terms “match” and “mismatch” as used herein refer to the hybridization potential of paired nucleotides in complementary nucleic acid strands. Matched nucleotides hybridize efficiently, such as the classical A-T and G-C base pair mentioned above. Mismatches are other combinations of nucleotides that do not hybridize efficiently.

[0296] Guidance for performing hybridization reactions can be found in Ausubel et al., (1998, supra), Sections 6.3.1-6.3.6. Aqueous and non-aqueous methods are described in that reference and either can be used. Reference herein to low stringency conditions include and encompass from at least about 1% v/v to at least about 15% v/v formamide and from at least about 1 M to at least about 2 M salt for hybridization at 42° C., and at least about 1 M to at least about 2 M salt for washing at 42° C. Low stringency conditions also may include 1% Bovine Serum Albumin (BSA), 1 mM EDTA, 0.5 M NaHPO₄ (pH 7.2), 7% SDS for hybridization at 65° C., and (i) 2×SSC, 0.1% SDS; or (ii) 0.5% BSA, 1 mM EDTA, 40 mM NaHPO₄ (pH 7.2), 5% SDS for washing at room temperature. One embodiment of low stringency conditions includes hybridization in 6×sodium chloride/sodium citrate (SSC) at about 45° C., followed by two washes in 0.2×SSC, 0.1% SDS at least at 50° C. (the temperature of the washes can be increased to 55° C. for low stringency conditions). Medium stringency conditions include and encompass from at least about 16% v/v to at least about 30% v/v formamide and from at least about 0.5 M to at least about 0.9 M salt for hybridization at 42° C., and at least about 0.1 M to at least about 0.2 M salt for washing at 55° C. Medium stringency conditions also may include 1% Bovine Serum Albumin (BSA), 1 mM EDTA, 0.5 M NaHPO₄ (pH 7.2), 7% SDS for hybridization at 65° C., and (i) 2×SSC, 0.1% SDS; or (ii) 0.5% BSA, 1 mM EDTA, 40 mM NaHPO₄ (pH 7.2), 5% SDS for washing at 60-65° C. One embodiment of medium stringency conditions includes hybridizing in 6×SSC at about 45° C., followed by one or more washes in 0.2×SSC, 0.1% SDS at 60° C. High stringency conditions include and encompass from at least about 31% v/v to at least about 50% v/v formamide and from about 0.01 M to about 0.15 M salt for hybridization at 42° C., and about 0.01 M to about 0.02 M salt for washing at 55° C. High stringency conditions also may include 1% BSA, 1 mM EDTA, 0.5 M NaHPO₄ (pH 7.2), 7% SDS for hybridization at 65° C., and (i) 0.2×SSC, 0.1% SDS; or (ii) 0.5% BSA, 1 mM EDTA, 40 mM NaHPO₄ (pH 7.2), 1% SDS for washing at a temperature in excess of 65° C. One embodiment of high stringency conditions includes hybridizing in 6×SSC at about 45° C., followed by one or more washes in 0.2×SSC, 0.1% SDS at 65° C.

[0297] In certain embodiments, a corresponding BaSIRS, VaSIRS, PaSIRS or InSIRS biomarker polynucleotide is one that hybridizes to a disclosed nucleotide sequence under very high stringency conditions. One embodiment of very high stringency conditions includes hybridizing 0.5 M sodium phosphate, 7% SDS at 65° C., followed by one or more washes at 0.2×SSC, 1% SDS at 65° C.

[0298] Other stringency conditions are well known in the art and a skilled addressee will recognize that various factors can be manipulated to optimize the specificity of the hybridization. Optimization of the stringency of the final washes can serve to ensure a high degree of hybridization. For detailed examples, see Ausubel et al., supra at pages 2.10.1 to 2.10.16 and Sambrook et al. (1989, supra) at sections 1.101 to 1.104.

[0299] Generally, a sample is processed prior to BaSIRS, VaSIRS, PaSIRS, InSIRS, BIP, VIP or PIP biomarker detection or quantification. For example, nucleic acid and/or proteins may be extracted, isolated, and/or purified from a sample prior to analysis. Various DNA, mRNA, and/or protein extraction techniques are well known to those skilled in the art. Processing may include centrifugation, ultracentrifugation, ethanol precipitation, filtration, fractionation, resuspension, dilution, concentration, etc. In some embodiments, methods and systems provide analysis (e.g., quantification of RNA or protein biomarkers) from raw sample (e.g., biological fluid such as blood, serum, etc.) without or with limited processing.

[0300] Methods may comprise steps of homogenizing a sample in a suitable buffer, removal of contaminants and/or assay inhibitors, adding a BaSIRS, VaSIRS, PaSIRS, InSIRS, BIP, VIP or PIP biomarker capture reagent (e.g., a magnetic bead to which is linked an oligonucleotide complementary to a target BaSIRS, VaSIRS, PaSIRS, InSIRS, BIP, VIP or PIP nucleic acid biomarker), incubated under conditions that promote the association (e.g., by hybridization) of the target biomarker with the capture reagent to produce a target biomarker:capture reagent complex, incubating the target biomarker:capture complex under target biomarker-release conditions. In some embodiments, multiple BaSIRS, VaSIRS, PaSIRS, InSIRS, BIP, VIP or PIP biomarkers are isolated in each round of isolation by adding multiple BaSIRS, VaSIRS, PaSIRS, InSIRS, BIP, VIP or PIP biomarkers capture reagents (e.g., specific to the desired biomarkers) to the solution. For example, multiple BaSIRS, VaSIRS, PaSIRS, InSIRS, BIP, VIP or PIP biomarker capture reagents, each comprising an oligonucleotide specific for a different target BaSIRS, VaSIRS, PaSIRS, InSIRS, BIP, VIP or PIP biomarker can be added to the sample for isolation of multiple BaSIRS, VaSIRS, PaSIRS, InSIRS, BIP, VIP or PIP biomarker. It is contemplated that the methods encompass multiple experimental designs that vary both in the number of capture steps and in the number of target BaSIRS, VaSIRS, PaSIRS, InSIRS, BIP, VIP or PIP biomarker captured in each capture step. In some embodiments, capture reagents are molecules, moieties, substances, or compositions that preferentially (e.g., specifically and selectively) interact with a particular biomarker sought to be isolated, purified, detected, and/or quantified. Any capture reagent having desired binding affinity and/or specificity to the particular BaSIRS, VaSIRS, PaSIRS, InSIRS, BIP, VIP or PIP biomarker can be used in the present technology. For example, the capture reagent can be a macromolecule such as a peptide, a protein (e.g., an antibody or receptor), an oligonucleotide, a nucleic acid, (e.g., nucleic acids capable of hybridizing with the VaSIRS biomarkers), vitamins, oligosaccharides, carbohydrates, lipids, or small molecules, or a complex thereof. As illustrative and non-limiting examples, an avidin target capture reagent may be used to isolate and purify targets comprising a biotin moiety, an antibody may be used to isolate and purify targets comprising the appropriate antigen or epitope, and an oligonucleotide may be used to isolate and purify a complementary oligonucleotide.

[0301] Any nucleic acids, including single-stranded and double-stranded nucleic acids, that are capable of binding, or specifically binding, to a target BaSIRS, VaSIRS, PaSIRS, InSIRS, BIP, VIP or PIP biomarker can be used as the capture reagent. Examples of such nucleic acids include DNA, RNA, aptamers, peptide nucleic acids, and other modifications to the sugar, phosphate, or nucleoside base. Thus, there are many strategies for capturing a target and accordingly many types of capture reagents are known to those in the art.

[0302] In addition, BaSIRS, VaSIRS, PaSIRS, InSIRS, BIP, VIP or PIP biomarker capture reagents may comprise a functionality to localize, concentrate, aggregate, etc. the capture reagent and thus provide a way to isolate and purify the target BaSIRS, VaSIRS, PaSIRS, InSIRS, BIP, VIP or PIP biomarker when captured (e.g., bound, hybridized, etc.) to the capture reagent (e.g., when a target:capture reagent complex is formed). For example, in some embodiments the portion of the capture reagent that interacts with the BaSIRS, VaSIRS, PaSIRS, InSIRS, BIP, VIP or PIP biomarker (e.g., an oligonucleotide) is linked to a solid support (e.g., a bead, surface, resin, column, and the like) that allows manipulation by the user on a macroscopic scale. Often, the solid support allows the use of a mechanical means to isolate and purify the target:capture reagent complex from a heterogeneous solution. For example, when linked to a bead, separation is achieved by removing the bead from the heterogeneous solution, e.g., by physical movement. In embodiments in which the bead is magnetic or paramagnetic, a magnetic field is used to achieve physical separation of the capture reagent (and thus the target BaSIRS, VaSIRS, PaSIRS, InSIRS, BIP, VIP or PIP biomarker) from the heterogeneous solution.

[0303] The BaSIRS, VaSIRS, PaSIRS, InSIRS, BIP, VIP or PIP biomarkers may be quantified or detected using any suitable means. In specific embodiments, the BaSIRS, VaSIRS, PaSIRS, InSIRS, BIP, VIP or PIP biomarkers are quantified using reagents that determine the level, abundance or amount of individual BaSIRS, VaSIRS, PaSIRS, InSIRS, BIP, VIP or PIP biomarkers. Non-limiting reagents of this type include reagents for use in nucleic acid- and protein-based assays.

[0304] In illustrative nucleic acid-based assays, nucleic acid is isolated from cells contained in the biological sample according to standard methodologies (Sambrook, et al., 1989, supra; and Ausubel et al., 1994, supra). The nucleic acid is typically fractionated (e.g., poly A⁺ RNA) or whole cell RNA. Where RNA is used as the subject of detection, it may be desired to convert the RNA to a complementary DNA (cDNA). In some embodiments, the nucleic acid is amplified by a template-dependent nucleic acid amplification reaction. A number of template dependent processes are available to amplify the BaSIRS, VaSIRS, PaSIRS, InSIRS, BIP, VIP or PIP biomarker sequences present in a given template sample. An exemplary nucleic acid amplification technique is the polymerase chain reaction (referred to as PCR), which is described in detail in U.S. Pat. Nos. 4,683,195, 4,683,202 and 4,800,159, Ausubel et al. (supra), and in Innis et al., (“PCR Protocols”, Academic Press, Inc., San Diego Calif., 1990). Briefly, in PCR, two primer sequences are prepared that are complementary to regions on opposite complementary strands of the biomarker sequence. An excess of deoxynucleotide triphosphates are added to a reaction mixture along with a DNA polymerase, e.g., Taq polymerase. If a cognate BaSIRS, VaSIRS, PaSIRS, InSIRS, BIP, VIP or PIP biomarker sequence is present in a sample, the primers will bind to the biomarker and the polymerase will cause the primers to be extended along the biomarker sequence by adding on nucleotides. By raising and lowering the temperature of the reaction mixture, the extended primers will dissociate from the biomarker to form reaction products, excess primers will bind to the biomarker and to the reaction products and the process is repeated. A reverse transcriptase PCR amplification procedure may be performed in order to quantify the amount of mRNA amplified. Methods of reverse transcribing RNA into cDNA are well known and described in Sambrook et al., 1989, supra. Alternative methods for reverse transcription utilize thermostable, RNA-dependent DNA polymerases. These methods are described in WO 90/07641. Polymerase chain reaction methodologies are well known in the art. In specific embodiments in which whole cell RNA is used, cDNA synthesis using whole cell RNA as a sample produces whole cell cDNA.

[0305] Detection and/or quantification of the amplified target polynucleotides may be facilitated by attachment of a heterologous detectable label to an oligonucleotide primer or probe that is used in the amplification reaction, illustrative examples of which include radioisotopes, fluorophores, chemiluminophores, bioluminescent molecules, lanthanide ions (e.g., Eu³⁴), enzymes, colloidal particles, dye particles and fluorescent microparticles or nanoparticles, as well as antigens, antibodies, haptens, avidin/streptavidin, biotin, enzyme cofactors/substrates, enzymes, and the like. A label can optionally be attached to or incorporated into an oligonucleotide probe or primer to allow detection and/or quantitation of a target polynucleotide representing the target sequence of interest. The target polynucleotide may be the expressed target sequence RNA itself, a cDNA copy thereof, or an amplification product derived therefrom, and may be the positive or negative strand, so long as it can be specifically detected in the assay being used. In certain multiplex formats, labels used for detecting different targets may be distinguishable. The label can be attached directly (e.g., via covalent linkage) or indirectly, e.g., via a bridging molecule or series of molecules (e.g., a molecule or complex that can bind to an assay component, or via members of a binding pair that can be incorporated into assay components, e.g., biotin-avidin or streptavidin). Many labels are commercially available in activated forms which can readily be used for such conjugation (for example through amine acylation), or labels may be attached through known or determinable conjugation schemes, many of which are known in the art.

[0306] Labels useful in the invention described herein include any substance which can be detected when bound to or incorporated into the biomolecule of interest. Any effective detection method can be used, including optical, spectroscopic, electrical, piezoelectrical, magnetic, Raman scattering, surface plasmon resonance, colorimetric, calorimetric, etc. A label is typically selected from a chromophore, a lumiphore, a fluorophore, one member of a quenching system, a chromogen, a hapten, an antigen, a magnetic particle, a material exhibiting nonlinear optics, a semiconductor nanocrystal, a metal nanoparticle, an enzyme, an antibody or binding portion or equivalent thereof, an aptamer, and one member of a binding pair, and combinations thereof. Quenching schemes may be used, wherein a quencher and a fluorophore as members of a quenching pair may be used on a probe, such that a change in optical parameters occurs upon binding to the target introduce or quench the signal from the fluorophore. One example of such a system is a molecular beacon. Suitable quencher/fluorophore systems are known in the art. The label may be bound through a variety of intermediate linkages. For example, a polynucleotide may comprise a biotin-binding species, and an optically detectable label may be conjugated to biotin and then bound to the labeled polynucleotide. Similarly, a polynucleotide sensor may comprise an immunological species such as an antibody or fragment, and a secondary antibody containing an optically detectable label may be added.

[0307] Chromophores useful in the methods described herein include any substance which can absorb energy and emit light. For multiplexed assays, a plurality of different signaling chromophores can be used with detectably different emission spectra. The chromophore can be a lumiphore or a fluorophore. Typical fluorophores include fluorescent dyes, semiconductor nanocrystals, lanthanide chelates, polynucleotide-specific dyes and green fluorescent protein.

[0308] In certain advantageous embodiments, the template-dependent amplification reaction involves quantification of transcripts. For example, RNA or DNA may be quantified using a quantitative real-time PCR technique (Higuchi, 1992, et al., Biotechnology 10: 413-417). By determining the concentration of the amplified products of the target DNA in PCR reactions that have completed the same number of cycles and are in their linear ranges, it is possible to determine the relative levels of the specific target sequence in the original DNA mixture. If the DNA mixtures are cDNAs synthesized from RNAs isolated from different tissues or cells, the relative abundance of the specific mRNA from which the target sequence was derived can be determined for the respective tissues or cells. This direct proportionality between the concentration of the PCR products and the relative mRNA abundance is only true in the linear range of the PCR reaction. The final concentration of the target DNA in the plateau portion of the curve is determined by the availability of reagents in the reaction mix and is independent of the original concentration of target DNA. In specific embodiments, quantitative PCR (qPCR) is combined with fluorescence chemistry to enable real-time monitoring of the amplification reaction using detection of a fluorescent light signal. In illustrative examples, the qPCR methods use a sequence nonspecific fluorescent reporter dye such as SYBR green (see, Wittwer et al., Biotechniques 22(1):176-181, 1997). In other examples, the qPCR methods use a sequence specific fluorescent reporter such as a TAQMAN probe (see, Heid, et al., Genome Res. 6(10):986-994, 1996). During execution of the PCR cycling program, the samples are excited using a light source. A fluorescent signal, indicating the amount of PCR amplification product produced, is monitored in each reaction well using a photodetector or CCD/CMOS camera. By monitoring the fluorescence in the sample during the reaction precise quantitative measurements can be made. The probe based PCR method is considered to more accurate than the SYBR green method. PCR or qPCR is typically performed in plastic 96 or 384 well microtiter plates, each reaction having a volume in the order of 5-50 μL. PCR can however be carried out in very small (nanoliter) volumes. Other quantification strategies may be employed such as Molecular Beacon Probes (see, Tyagi et al., Nature Biotechnology 14: 303-308, 1996; or Situma et al., Analytical Biochemistry 363: 35-45, 2007).

[0309] Real-time PCR can be performed to detect a single gene or RNA molecule, however, multiple genes or RNA molecules may be detected in one reaction, i.e., by multiplexing. Detection of nucleic acids by multiplexing is described by Kosman, et al. (Science, 305: 846, 2004); Sakai et al. (BioScience Trends 2(4):164-168, 2008); or Gu et al. (Journal of Clinical Microbiology, 41(10): 4636-4641, 2003). For example, one or more biomarker mRNAs may be detected simultaneously, optionally with one or more housekeeping mRNAs in a single reaction. In certain embodiments, multiple biomarkers (e.g., target polynucleotides) are analyzed using real-time quantitative multiplex RT-PCR platforms and other multiplexing technologies such as GenomeLab GeXP Genetic Analysis System (Beckman Coulter, Foster City, Calif.), SmartCycler® 9600 or GeneXpert® Systems (Cepheid, Sunnyvale, Calif.), ABI 7900 HT Fast Real Time PCR system (Applied Biosystems, Foster City, Calif.), LightCycler® 480 System (Roche Molecular Systems, Pleasanton, Calif.), xMAP 100 System (Luminex, Austin, Tex.) Solexa Genome Analysis System (Illumina, Hayward, Calif.), OpenArray Real Time qPCR (BioTrove, Woburn, Mass.) and BeadXpress System (Illumina, Hayward, Calif.). In illustrative examples, multiplexed, tandem PCR (MT-PCR) is employed, which uses a two-step process for gene expression profiling from small quantities of RNA or DNA, as described for example in U.S. Pat. Appl. Pub. No. 20070190540. In the first step, RNA is converted into cDNA and amplified using multiplexed gene specific primers. In the second step each individual gene is quantitated by real-time PCR.

[0310] In certain embodiments, target nucleic acids are quantified using blotting techniques, which are well known to those of skill in the art. Southern blotting involves the use of DNA as a target, whereas Northern blotting involves the use of RNA as a target. Each provides different types of information, although cDNA blotting is analogous, in many aspects, to blotting or RNA species. Briefly, a probe is used to target a DNA or RNA species that has been immobilized on a suitable matrix, often a filter of nitrocellulose. The different species should be spatially separated to facilitate analysis. This often is accomplished by gel electrophoresis of nucleic acid species followed by “blotting” on to the filter. Subsequently, the blotted target is incubated with a probe (usually labeled) under conditions that promote denaturation and rehybridization. Because the probe is designed to base pair with the target, the probe will bind a portion of the target sequence under renaturing conditions. Unbound probe is then removed, and detection is accomplished as described above. Following detection/quantification, one may compare the results seen in a given subject with a control reaction or a statistically significant reference group or population of control subjects as defined herein. In this way, it is possible to correlate the amount of BaSIRS, VaSIRS, PaSIRS, InSIRS, BIP, VIP or PIP biomarker nucleic acid detected with the progression or severity of the disease.

[0311] Also contemplated are biochip-based technologies such as those described by Hacia et al. (1996, Nature Genetics 14: 441-447) and Shoemaker et al. (1996, Nature Genetics 14: 450-456). Briefly, these techniques involve quantitative methods for analyzing large numbers of genes rapidly and accurately. By tagging genes with oligonucleotides or using fixed nucleic acid probe arrays, one can employ biochip technology to segregate target molecules as high-density arrays and screen these molecules on the basis of hybridization. See also Pease et al. (1994, Proc. Natl. Acad. Sci. U.S.A. 91: 5022-5026); Fodor et al. (1991, Science 251: 767-773). Briefly, nucleic acid probes to BaSIRS, VaSIRS, PaSIRS, InSIRS, BIP, VIP or PIP biomarker polynucleotides are made and attached to biochips to be used in screening and diagnostic methods, as outlined herein. The nucleic acid probes attached to the biochip are designed to be substantially complementary to specific expressed BaSIRS, VaSIRS, PaSIRS, InSIRS, BIP, VIP or PIP biomarker nucleic acids, i.e., the target sequence (either the target sequence of the sample or to other probe sequences, for example in sandwich assays), such that hybridization of the target sequence and the probes of the present invention occur. This complementarity need not be perfect; there may be any number of base pair mismatches, which will interfere with hybridization between the target sequence and the nucleic acid probes of the present invention. However, if the number of mismatches is so great that no hybridization can occur under even the least stringent of hybridization conditions, the sequence is not a complementary target sequence. In certain embodiments, more than one probe per sequence is used, with either overlapping probes or probes to different sections of the target being used. That is, two, three, four or more probes, with three being desirable, are used to build in a redundancy for a particular target. The probes can be overlapping (i.e. have some sequence in common), or separate.

[0312] In an illustrative biochip analysis, oligonucleotide probes on the biochip are exposed to or contacted with a nucleic acid sample suspected of containing one or more BaSIRS, VaSIRS, PaSIRS, InSIRS, BIP, VIP or PIP biomarker polynucleotides under conditions favoring specific hybridization. Sample extracts of DNA or RNA, either single or double-stranded, may be prepared from fluid suspensions of biological materials, or by grinding biological materials, or following a cell lysis step which includes, but is not limited to, lysis effected by treatment with SDS (or other detergents), osmotic shock, guanidinium isothiocyanate and lysozyme. Suitable DNA, which may be used in the method of the invention, includes cDNA. Such DNA may be prepared by any one of a number of commonly used protocols as for example described in Ausubel, et al., 1994, supra, and Sambrook, et al., 1989, supra.

[0313] Suitable RNA, which may be used in the method of the invention, includes messenger RNA, complementary RNA transcribed from DNA (cRNA) or genomic or subgenomic RNA. Such RNA may be prepared using standard protocols as for example described in the relevant sections of Ausubel, et al. 1994, supra and Sambrook, et al. 1989, supra).

[0314] cDNA may be fragmented, for example, by sonication or by treatment with restriction endonucleases. Suitably, cDNA is fragmented such that resultant DNA fragments are of a length greater than the length of the immobilized oligonucleotide probe(s) but small enough to allow rapid access thereto under suitable hybridization conditions. Alternatively, fragments of cDNA may be selected and amplified using a suitable nucleotide amplification technique, as described for example above, involving appropriate random or specific primers.

[0315] Usually the target BaSIRS, VaSIRS, PaSIRS, InSIRS, BIP, VIP or PIP biomarker polynucleotides are detectably labeled so that their hybridization to individual probes can be determined. The target polynucleotides are typically detectably labeled with a heterologous label or reporter molecule illustrative examples of which include those mentioned above in respect for the primers or probes used in.

[0316] The hybrid-forming step can be performed under suitable conditions for hybridizing oligonucleotide probes to test nucleic acid including DNA or RNA. In this regard, reference may be made, for example, to NUCLEIC ACID HYBRIDIZATION, A PRACTICAL APPROACH (Homes and Higgins, eds.) (IRL press, Washington D.C., 1985). In general, whether hybridization takes place is influenced by the length of the oligonucleotide probe and the polynucleotide sequence under test, the pH, the temperature, the concentration of mono- and divalent cations, the proportion of G and C nucleotides in the hybrid-forming region, the viscosity of the medium and the possible presence of denaturants. Such variables also influence the time required for hybridization. The preferred conditions will therefore depend upon the particular application. Such empirical conditions, however, can be routinely determined without undue experimentation.

[0317] After the hybrid-forming step, the probes are washed to remove any unbound nucleic acid with a hybridization buffer. This washing step leaves only bound target polynucleotides. The probes are then examined to identify which probes have hybridized to a target polynucleotide.

[0318] The hybridization reactions are then detected to determine which of the probes has hybridized to a corresponding target sequence. Depending on the nature of the reporter molecule associated with a target polynucleotide, a signal may be instrumentally detected by irradiating a fluorescent label with light and detecting fluorescence in a fluorimeter; by providing for an enzyme system to produce a dye which could be detected using a spectrophotometer; or detection of a dye particle or a colored colloidal metallic or non-metallic particle using a reflectometer; in the case of using a radioactive label or chemiluminescent molecule employing a radiation counter or autoradiography. Accordingly, a detection means may be adapted to detect or scan light associated with the label which light may include fluorescent, luminescent, focused beam or laser light. In such a case, a charge couple device (CCD) or a photocell can be used to scan for emission of light from a probe:target polynucleotide hybrid from each location in the micro-array and record the data directly in a digital computer. In some cases, electronic detection of the signal may not be necessary. For example, with enzymatically generated color spots associated with nucleic acid array format, visual examination of the array will allow interpretation of the pattern on the array. In the case of a nucleic acid array, the detection means is suitably interfaced with pattern recognition software to convert the pattern of signals from the array into a plain language genetic profile. In certain embodiments, oligonucleotide probes specific for different VaSIRS biomarker polynucleotides are in the form of a nucleic acid array and detection of a signal generated from a reporter molecule on the array is performed using a ‘chip reader’. A detection system that can be used by a ‘chip reader’ is described for example by Pirrung et al. (U.S. Pat. No. 5,143,854). The chip reader will typically also incorporate some signal processing to determine whether the signal at a particular array position or feature is a true positive or maybe a spurious signal. Exemplary chip readers are described for example by Fodor et al. (U.S. Pat. No. 5,925,525). Alternatively, when the array is made using a mixture of individually addressable kinds of labeled microbeads, the reaction may be detected using flow cytometry.

[0319] In certain embodiments, the BaSIRS, VaSIRS, PaSIRS, InSIRS, BIP, VIP or PIP biomarker is a target RNA (e.g., mRNA) or a DNA copy of the target RNA whose level or abundance is measured using at least one nucleic acid probe that hybridizes under at least low, medium, or high stringency conditions to the target RNA or to the DNA copy, wherein the nucleic acid probe comprises at least 15 (e.g., 15, 16, 17, 18, 19, 20, 21, 22, 23, 24, 25, 26, 27, 28, 29, 30, or more) contiguous nucleotides of BaSIRS, VaSIRS, PaSIRS, BIP, VIP or PIP biomarker polynucleotide. In some embodiments, the measured level or abundance of the target RNA or its DNA copy is normalized to the level or abundance of a reference RNA or a DNA copy of the reference RNA. Suitably, the nucleic acid probe is immobilized on a solid or semi-solid support. In illustrative examples of this type, the nucleic acid probe forms part of a spatial array of nucleic acid probes. In some embodiments, the level of nucleic acid probe that is bound to the target RNA or to the DNA copy is measured by hybridization (e.g., using a nucleic acid array). In other embodiments, the level of nucleic acid probe that is bound to the target RNA or to the DNA copy is measured by nucleic acid amplification (e.g., using a polymerase chain reaction (PCR)). In still other embodiments, the level of nucleic acid probe that is bound to the target RNA or to the DNA copy is measured by nuclease protection assay.

[0320] Sequencing technologies such as Sanger sequencing, pyrosequencing, sequencing by ligation, massively parallel sequencing, also called “Next-generation sequencing” (NGS), and other high-throughput sequencing approaches with or without sequence amplification of the target can also be used to detect or quantify the presence of BaSIRS, VaSIRS, PaSIRS, InSIRS, BIP, VIP or PIP nucleic acid biomarker in a sample. Sequence-based methods can provide further information regarding alternative splicing and sequence variation in previously identified genes. Sequencing technologies include a number of steps that are grouped broadly as template preparation, sequencing, detection and data analysis. Current methods for template preparation involve randomly breaking genomic DNA into smaller sizes from which each fragment is immobilized to a support. The immobilization of spatially separated fragment allows thousands to billions of sequencing reaction to be performed simultaneously. A sequencing step may use any of a variety of methods that are commonly known in the art. One specific example of a sequencing step uses the addition of nucleotides to the complementary strand to provide the DNA sequence. The detection steps range from measuring bioluminescent signal of a synthesized fragment to four-color imaging of single molecule. In some embodiments in which NGS is used to detect or quantify the presence of BaSIRS, VaSIRS, PaSIRS, InSIRS, BIP, VIP or PIP nucleic acid biomarker in a sample, the methods are suitably selected from semiconductor sequencing (Ion Torrent; Personal Genome Machine); Helicos True Single Molecule Sequencing (tSMS) (Harris et al. 2008, Science 320:106-109); 454 sequencing (Roche) (Margulies et al. 2005, Nature, 437, 376-380); SOLiD technology (Applied Biosystems); SOLEXA sequencing (Illumina); single molecule, real-time (SMRT™) technology of Pacific Biosciences; nanopore sequencing (Soni and Meller, 2007. Clin Chem 53: 1996-2001); DNA nanoball sequencing; sequencing using technology from Dover Systems (Polonator), and technologies that do not require amplification or otherwise transform native DNA prior to sequencing (e.g., Pacific Biosciences and Helicos), such as nanopore-based strategies (e.g., Oxford Nanopore, Genia Technologies, and Nabsys).

[0321] In other embodiments, BaSIRS, VaSIRS, PaSIRS or InSIRS biomarker protein levels are assayed using protein-based assays known in the art. For example, when BaSIRS, VaSIRS, PaSIRS or InSIRS biomarker protein is an enzyme, the protein can be quantified based upon its catalytic activity or based upon the number of molecules of the protein contained in a sample. Antibody-based techniques may be employed including, for example, immunoassays, such as the enzyme-linked immunosorbent assay (ELISA) and the radioimmunoassay (RIA).

[0322] In other embodiments, BIP, VIP or PIP biomarker proteins, carbohydrates, lipids, metabolites or combinations of such pathogenic molecules are assayed using assays known in the art. Such assays could include, by example; enzyme immunoassay, mass spectrometry, liquid chromatography, lateral immunochromatography, or other methods capable of quantifying such molecules.

[0323] In specific embodiments, protein-capture arrays that permit simultaneous detection and/or quantification of a large number of proteins are employed. For example, low-density protein arrays on filter membranes, such as the universal protein array system (Ge, 2000 Nucleic Acids Res. 28(2):e3) allow imaging of arrayed antigens using standard ELISA techniques and a scanning charge-coupled device (CCD) detector. Immuno-sensor arrays have also been developed that enable the simultaneous detection of clinical analytes. It is now possible using protein arrays, to profile protein expression in bodily fluids, such as in sera of healthy or diseased subjects, as well as in subjects pre- and post-drug treatment.

[0324] Exemplary protein capture arrays include arrays comprising spatially addressed antigen-binding molecules, commonly referred to as antibody arrays, which can facilitate extensive parallel analysis of numerous proteins defining a proteome or subproteome. Antibody arrays have been shown to have the required properties of specificity and acceptable background, and some are available commercially (e.g., BD Biosciences, Clontech, Bio-Rad and Sigma). Various methods for the preparation of antibody arrays have been reported (see, e.g., Lopez et al., 2003 J. Chromatogram. B 787:19-27; Cahill, 2000 Trends in Biotechnology 7:47-51; U.S. Pat. App. Pub. 2002/0055186; U.S. Pat. App. Pub. 2003/0003599; PCT publication WO 03/062444; PCT publication WO 03/077851; PCT publication WO 02/59601; PCT publication WO 02/39120; PCT publication WO 01/79849; PCT publication WO 99/39210). The antigen-binding molecules of such arrays may recognize at least a subset of proteins expressed by a cell or population of cells, illustrative examples of which include growth factor receptors, hormone receptors, neurotransmitter receptors, catecholamine receptors, amino acid derivative receptors, cytokine receptors, extracellular matrix receptors, antibodies, lectins, cytokines, serpins, proteases, kinases, phosphatases, ras-like GTPases, hydrolases, steroid hormone receptors, transcription factors, heat-shock transcription factors, DNA-binding proteins, zinc-finger proteins, leucine-zipper proteins, homeodomain proteins, intracellular signal transduction modulators and effectors, apoptosis-related factors, DNA synthesis factors, DNA repair factors, DNA recombination factors and cell-surface antigens.

[0325] Individual spatially distinct protein-capture agents are typically attached to a support surface, which is generally planar or contoured. Common physical supports include glass slides, silicon, microwells, nitrocellulose or PVDF membranes, and magnetic and other microbeads.

[0326] Particles in suspension can also be used as the basis of arrays, providing they are coded for identification; systems include color coding for microbeads (e.g., available from Luminex, Bio-Rad and Nanomics Biosystems) and semiconductor nanocrystals (e.g., QDots™, available from Quantum Dots), and barcoding for beads (UltraPlex™, available from Smartbeads) and multimetal microrods (Nanobarcodes™ particles, available from Surromed). Beads can also be assembled into planar arrays on semiconductor chips (e.g., available from LEAPS technology and BioArray Solutions). Where particles are used, individual protein-capture agents are typically attached to an individual particle to provide the spatial definition or separation of the array. The particles may then be assayed separately, but in parallel, in a compartmentalized way, for example in the wells of a microtiter plate or in separate test tubes.

[0327] In operation, a protein sample, which is optionally fragmented to form peptide fragments (see, e.g., U.S. Pat. App. Pub. 2002/0055186), is delivered to a protein-capture array under conditions suitable for protein or peptide binding, and the array is washed to remove unbound or non-specifically bound components of the sample from the array. Next, the presence or amount of protein or peptide bound to each feature of the array is detected using a suitable detection system. The amount of protein bound to a feature of the array may be determined relative to the amount of a second protein bound to a second feature of the array. In certain embodiments, the amount of the second protein in the sample is already known or known to be invariant.

[0328] In specific embodiments, the BaSIRS, VaSIRS, PaSIRS, InSIRS, BIP, VIP or PIP biomarker is a target polypeptide whose level is measured using at least one antigen-binding molecule that is immuno-interactive with the target polypeptide. In these embodiments, the measured level of the target polypeptide is normalized to the level of a reference polypeptide. Suitably, the antigen-binding molecule is immobilized on a solid or semi-solid support. In illustrative examples of this type, the antigen-binding molecule forms part of a spatial array of antigen-binding molecule. In some embodiments, the level of antigen-binding molecule that is bound to the target polypeptide is measured by immunoassay (e.g., using an ELISA).

[0329] All the essential reagents required for detecting and quantifying the BaSIRS, VaSIRS, PaSIRS, InSIRS, BIP, VIP or PIP biomarkers of the invention may be assembled together in a kit. In some embodiments, the kit comprises a reagent that permits quantification of at least one BaSIRS, VaSIRS, PaSIRS, InSIRS biomarker in combination with at least one BIP, VIP or PIP biomarker. In some embodiments the kit comprises: (i) a reagent that allows quantification (e.g., determining the level) of a first BaSIRS, VaSIRS, PaSIRS or InSIRS biomarker; and (ii) a reagent that allows quantification (e.g., determining the level) of a second BaSIRS, VaSIRS, PaSIRS or InSIRS biomarker, wherein the first and second biomarkers form a pair of derived biomarkers, as defined herein; and (iii) a reagent that allows quantification (e.g., determining the level or abundance) of a BIP, VIP or PIP biomarker. In some embodiments, the kit further comprises (iv) a reagent that allows quantification (e.g., determining the level or abundance) of a third BaSIRS, VaSIRS, PaSIRS or InSIRS biomarker; and (v) a reagent that allows quantification (e.g., determining the level or abundance) of a fourth BaSIRS, VaSIRS, PaSIRS or InSIRS biomarker, wherein the third and fourth biomarkers form a pair of derived biomarkers, as defined herein; and, (vi) a reagent that allows quantification (e.g., determining the level or abundance) of a second BIP, VIP or PIP biomarker. In some embodiments, the kit further comprises (vii) a reagent that allows quantification (e.g., determining the level or abundance) of a fifth BaSIRS, VaSIRS, PaSIRS or InSIRS biomarker; and (viii) a reagent that allows quantification (e.g., determining the level or abundance) of a sixth BaSIRS, VaSIRS, PaSIRS or InSIRS biomarker, wherein the fifth and sixth biomarkers form a pair of derived biomarkers, as defined herein; and, (ix) a reagent that allows quantification (e.g., determining the level or abundance) of a third BIP, VIP or PIP biomarker.

[0330] In the context of the present invention, “kit” is understood to mean a product containing the different reagents necessary for carrying out the methods of the invention packed so as to allow their transport and storage. Materials suitable for packing the components of the kit include crystal, plastic (polyethylene, polypropylene, polycarbonate and the like), bottles, vials, paper, envelopes and the like. Additionally, the kits of the invention can contain instructions for the simultaneous, sequential or separate use of the different components contained in the kit. The instructions can be in the form of printed material or in the form of an electronic support capable of storing instructions such that they can be read by a subject, such as electronic storage media (magnetic disks, tapes and the like), optical media (CD-ROM, DVD) and the like. Alternatively or in addition, the media can contain Internet addresses that provide the instructions.

[0331] Reagents that allow quantification of a BaSIRS, VaSIRS, PaSIRS, InSIRS, BIP, VIP or PIP biomarker include compounds or materials, or sets of compounds or materials, which allow quantification of the BaSIRS, VaSIRS, PaSIRS, InSIRS, BIP, VIP or PIP biomarkers. In specific embodiments, the compounds, materials or sets of compounds or materials permit (i) determining the expression level of a gene (e.g., BaSIRS, VaSIRS, PaSIRS or InSIRS biomarker gene), and (ii) determining the presence, absence, type, sequence of nucleic acid (e.g., BIP, VIP or PIP biomarker gene), including without limitation the extraction of RNA or DNA material, the determination of the level of a corresponding RNA, DNA etc., the determination of a particular nucleic acid sequence, primers for the synthesis of a corresponding cDNA and DNA, a thermostable DNA polymerase, primers for amplification of DNA, and/or probes capable of specifically hybridizing with the RNAs, corresponding cDNAs encoded by the genes, DNAs, TaqMan probes, etc.

[0332] The kits may also optionally include appropriate reagents for detection of labels, positive and negative controls, washing solutions, blotting membranes, microtiter plates, dilution buffers and the like. For example, a nucleic acid-based detection kit may include (i) a BaSIRS, VaSIRS, PaSIRS, InSIRS, BIP, VIP or PIP biomarker polynucleotide (which may be used as a positive control), (ii) a primer or probe that specifically hybridizes to a BaSIRS, VaSIRS, PaSIRS, InSIRS, BIP, VIP or PIP biomarker polynucleotide. Also included may be enzymes suitable for amplifying nucleic acids including various polymerases (reverse transcriptase, Taq, Sequenase™ DNA ligase etc. depending on the nucleic acid amplification technique employed), deoxynucleotides and buffers to provide the necessary reaction mixture for amplification. Such kits also generally will comprise, in suitable means, distinct containers for each individual reagent and enzyme as well as for each primer or probe. Alternatively, a protein-based detection kit may include (i) a BaSIRS, VaSIRS, PaSIRS, InSIRS, BIP, VIP or PIP biomarker polypeptide (which may be used as a positive control), (ii) an antibody that binds specifically to a BaSIRS, VaSIRS, PaSIRS, InSIRS, BIP, VIP or PIP biomarker polypeptide. The kit can also feature various devices (e.g., one or more) and reagents (e.g., one or more) for performing one of the assays described herein; and/or printed instructions for using the kit to quantify the expression of a BaSIRS, VaSIRS, PaSIRS, InSIRS biomarker gene in combination with the determination of the presence, absence, type, sequence of nucleic acid of a BIP, VIP or PIP biomarker gene.

[0333] The reagents described herein, which may be optionally associated with detectable labels, can be presented in the format of a microfluidics card, a chip or chamber, a Point-of-Care cartridge, a microarray or a kit adapted for use with the assays described in the examples or below, e.g., RT-PCR or Q PCR techniques described herein.

[0334] The reagents also have utility in compositions for detecting and quantifying the biomarkers of the invention. For example, a reverse transcriptase may be used to reverse transcribe RNA transcripts, including mRNA, in a nucleic acid sample, to produce reverse transcribed transcripts, including reverse transcribed mRNA (also referred to as “cDNA”). In specific embodiments, the reverse transcribed mRNA is whole cell reverse transcribed mRNA (also referred to herein as “whole cell cDNA”). The nucleic acid sample is suitably derived from components of the immune system, representative examples of which include components of the innate and adaptive immune systems as broadly discussed for example above. In specific embodiments, the reverse transcribed RNA is derived blood cells (e.g., peripheral blood cells). Suitably, the reverse transcribed RNA is derived leukocytes.

[0335] The reagents are suitably used to quantify the reverse transcribed transcripts. For example, oligonucleotide primers that hybridize to the reverse transcribed transcript can be used to amplify at least a portion of the reverse transcribed transcript via a suitable nucleic acid amplification technique, e.g., RT-PCR or qPCR techniques described herein. Alternatively, oligonucleotide probes may be used to hybridize to the reverse transcribed transcript for the quantification, using a nucleic acid hybridization analysis technique (e.g., microarray analysis), as described for example above. Thus, in some embodiments, a respective oligonucleotide primer or probe is hybridized to a complementary nucleic acid sequence of a reverse transcribed transcript in the compositions of the invention. The compositions typically comprise labeled reagents for detecting and/or quantifying the reverse transcribed transcripts. Representative reagents of this type include labeled oligonucleotide primers or probes that hybridize to RNA transcripts or reverse transcribed RNA, labeled RNA, labeled reverse transcribed RNA as well as labeled oligonucleotide linkers or tags (e.g., a labeled RNA or DNA linker or tag) for labeling (e.g., end labeling such as 3′ end labeling) RNA or reverse transcribed RNA. The primers, probes, RNA or reverse transcribed RNA (i.e., cDNA) (whether labeled or non-labeled) may be immobilized or free in solution. Representative reagents of this type include labeled oligonucleotide primers or probes that hybridize to reverse transcribed and transcripts as well as labeled reverse transcribed transcripts. The label can be any reporter molecule as known in the art, illustrative examples of which are described above and elsewhere herein.

[0336] The present invention also encompasses non-reverse transcribed RNA embodiments in which cDNA is not made and the RNA transcripts are directly the subject of the analysis. Thus, in other embodiments, reagents are suitably used to quantify RNA transcripts directly. For example, oligonucleotide probes can be used to hybridize to transcripts for quantification of immune system biomarkers of the invention, using a nucleic acid hybridization analysis technique (e.g., microarray analysis), as described for example above. Thus, in some embodiments, a respective oligonucleotide probe is hybridized to a complementary nucleic acid sequence of an immune system biomarker transcript in the compositions of the invention. In illustrative examples of this type, the compositions may comprise labeled reagents that hybridize to transcripts for detecting and/or quantifying the transcripts. Representative reagents of this type include labeled oligonucleotide probes that hybridize to transcripts as well as labeled transcripts. The primers or probes may be immobilized or free in solution.

### 3. Management, Treatment and Predictive Medicine Embodiments

[0337] The present invention also extends to the management of BaSIRS, VaSIRS, PaSIRS or InSIRS, or prevention of further progression of BaSIRS, VaSIRS, PaSIRS or InSIRS, or assessment of the efficacy of therapies in subjects following positive diagnosis for the presence of BaSIRS, VaSIRS, PaSIRS or InSIRS, in a subject. Once a subject is positively identified as having BaSIRS, VaSIRS, PaSIRS or InSIRS, the subject may be administered a therapeutic agent for treating the BaSIRS, VaSIRS, PaSIRS or InSIRS such as an anti-bacterial, anti-viral or anti-protozoal agent, illustrative examples of which include:

[0338] Anti-bacterial agents: Amikacin, Gentamicin, Kanamycin, Neomycin, Netilmicin, Tobramycin, Paromomycin, Streptomycin, Spectinomycin, Geldanamycin, Herbimycin, Rifaximin, Loracarbef, Ertapenem, Doripenem, Imipenem/Cilastatin, Meropenem, Cefadroxil, Cefazolin, Cefalotin or Cefalothin, Cefalexin, Cefaclor, Cefamandole, Cefoxitin, Cefprozil, Cefuroxime, Cefixime, Cefdinir, Cefditoren, Cefoperazone, Cefotaxime, Cefpodoxime, Ceftazidime, Ceftibuten, Ceftizoxime, Ceftriaxone, Cefepime, Ceftaroline fosamil, Ceftobiprole, Teicoplanin, Vancomycin, Telavancin, Dalbavancin, Oritavancin, Clindamycin, Lincomycin, Daptomycin, Azithromycin, Clarithromycin, Dirithromycin, Erythromycin, Roxithromycin, Troleandomycin, Telithromycin, Spiramycin, Aztreonam, Furazolidone, Nitrofurantoin, Linezolid, Posizolid, Radezolid, Torezolid, Amoxicillin, Ampicillin, Azlocillin, Carbenicillin, Cloxacillin, Dicloxacillin, Flucloxacillin, Mezlocillin, Methicillin, Nafcillin, Oxacillin, Penicillin G, Penicillin V, Piperacillin, Penicillin G, Temocillin, Ticarcillin, Amoxicillin/clavulanate, Ampicillin/sulbactam, Piperacillin/tazobactam, Ticarcillin/clavulanate, Bacitracin, Colistin, Polymyxin B, Ciprofloxacin, Enoxacin, Gatifloxacin, Gemifloxacin, Levofloxacin, Lomefloxacin, Moxifloxacin, Nalidixic acid, Norfloxacin, Ofloxacin, Trovafloxacin, Grepafloxacin, Sparfloxacin, Temafloxacin, Mafenide, Sulfacetamide, Sulfadiazine, Silver sulfadiazine, Sulfadimethoxine, Sulfamethizole, Sulfamethoxazole, Sulfanilimide, Sulfasalazine, Sulfisoxazole, Trimethoprim-Sulfamethoxazole, Sulfonamidochrysoidine, Demeclocycline, Doxycycline, Minocycline, Oxytetracycline, Tetracycline, Clofazimine, Dapsone, Capreomycin, Cycloserine, Ethambutol, Ethionamide, Isoniazid, Pyrazinamide, Rifampicin, Rifabutin, Rifapentine, Streptomycin, Arsphenamine, Chloramphenicol, Fosfomycin, Fusidic acid, Metronidazole, Mupirocin, Platensimycin, Quinupristin/Dalfopristin, Thiamphenicol, Tigecycline, Tinidazole, and Trimethoprim;

[0339] Anti-viral agents: asunaprevir, acyclovir, acyclovir, adefovir, amantadine, amprenavir, ampligen, arbidol, atazanavir, atripla, bacavir, boceprevir, cidofovir, combivir, complera, daclatasvir, darunavir, delavirdine, didanosine, docosanol, dolutegravir, edoxudine, efavirenz, emtricitabine, enfuvirtide, entecavir, famciclovir, fomivirsen, fosamprenavir, foscarnet, fosfonet, ganciclovir, ibacitabine, imunovir, idoxuridine, imiquimod, indinavir, inosine, interferon type III, interferon type II, interferon type I, lamivudine, lopinavir, loviride, maraviroc, moroxydine, methisazone, nelfinavir, nevirapine, nexavir, neuraminidase blocking agents, oseltamivir, peginterferon alfa-2a, penciclovir, peramivir, pleconaril, podofilox, podophyllin, podophyllotoxin, raltegravir, monoclonal antibody respigams, ribavirin, inhaled rhibovirons, rimantadine, ritonavir, pyrimidine, saquinavir, stavudine, stribild, tenofovir, tenofovir disoproxil, tenofovir alafenamide fumarate (TAF), tipranavir, trifluridine, trizivir, tromantadine, truvada, valaciclovir, valganciclovir, vicriviroc, vidarabine, viperin, viramidine, zalcitabine, zanamivir, zidovudine, or salts and combinations thereof; and

[0340] Anti-protozoal agents: Eflornithine, Furazolidone, Melarsoprol, Metronidazole, Ornidazole, Paromomycin sulfate, Pentamidine, Pyrimethamine, Tinidazole.

[0341] In a related aspect, the present invention contemplates the use of the indicator-determining methods, apparatus, compositions and kits disclosed herein in methods of treating, preventing or inhibiting the development or progression of BaSIRS, VaSIRS, PaSIRS or InSIRS in a subject. These methods (also referred to herein as “treatment methods”) generally comprise: exposing the subject to a treatment regimen for treating BaSIRS, VaSIRS, PaSIRS or InSIRS, or avoiding exposing the subject to a treatment regimen for treating a SIRS other than BaSIRS, VaSIRS, PaSIRS or InSIRS based on an indicator obtained from an indicator-determining method as disclosed herein.

[0342] Typically, the treatment regimen involves the administration of therapeutic agents effective amounts to achieve their intended purpose. The therapeutic agents are typically administered in the form a pharmaceutical composition that suitably includes a pharmaceutically acceptable carrier. The dose of active compounds administered to a subject should be sufficient to achieve a beneficial response in the subject over time such as a reduction in, or relief from, the symptoms of BaSIRS, VaSIRS, PaSIRS or InSIRS. The quantity of the of therapeutic agents to be administered may depend on the subject to be treated inclusive of the age, sex, weight and general health condition thereof. In this regard, precise amounts of the active agents(s) for administration will depend on the judgment of the practitioner. In determining the effective amount of the active agent(s) to be administered in the treatment or prevention of BaSIRS, VaSIRS, PaSIRS or InSIRS, the medical practitioner or veterinarian may evaluate severity of any symptom or clinical sign associated with the presence of BaSIRS, VaSIRS, PaSIRS or InSIRS or degree of BaSIRS, VaSIRS, PaSIRS or InSIRS including, inflammation, blood pressure anomaly, tachycardia, tachypnea fever, chills, vomiting, diarrhea, skin rash, headaches, confusion, muscle aches, seizures. In any event, those of skill in the art may readily determine suitable dosages of the therapeutic agents and suitable treatment regimens without undue experimentation.

[0343] The therapeutic agents may be administered in concert with adjunctive (palliative) therapies to increase oxygen supply to major organs, increase blood flow to major organs and/or to reduce the inflammatory response. Illustrative examples of such adjunctive therapies include non-steroidal-anti-inflammatory drugs (NSAIDs), intravenous saline and oxygen.

[0344] The present invention can be practiced in the field of predictive medicine for the purpose of diagnosis or monitoring the presence or development of BaSIRS, VaSIRS, PaSIRS or InSIRS in a subject, and/or monitoring response to therapy efficacy. The biomarker profiles and corresponding indicators of the present invention further enable determination of endpoints in pharmacotranslational studies. For example, clinical trials can take many months or even years to establish the pharmacological parameters for a medicament to be used in treating or preventing BaSIRS, VaSIRS, PaSIRS or InSIRS. However, these parameters may be associated with a biomarker profile and corresponding indicator of a health state (e.g., a healthy condition). Hence, the clinical trial can be expedited by selecting a treatment regimen (e.g., medicament and pharmaceutical parameters), which results in a biomarker profile associated with a desired health state (e.g., healthy condition). In these embodiments, the methods may comprise: (1) obtaining a biomarker profile of a sample taken from the subject after treatment of the subject with the treatment regimen, wherein the sample biomarker profile comprises (a) for each of a plurality of derived biomarkers as broadly defined above and elsewhere herein a plurality of host response specific derived biomarker values, and optionally (b) if the SIRS condition is an IpSIRS, a pathogen specific biomarker value as broadly defined above and elsewhere herein for a pathogen biomarker associated with the SIRS condition; and (2) comparing the sample biomarker profile to a reference biomarker profile that is correlated with a presence, absence or degree of the SIRS condition to thereby determine whether the treatment regimen is effective for changing the health status of the subject to the desired health state. Accordingly, this aspect of the present invention advantageously provides methods of monitoring the efficacy of a particular treatment regimen in a subject (for example, in the context of a clinical trial) already diagnosed with BaSIRS, VaSIRS, PaSIRS or InSIRS. These methods take advantage of derived biomarker values that correlate with treatment efficacy to determine, for example, whether derived biomarker values of a subject undergoing treatment partially or completely normalize during the course of or following therapy or otherwise shows changes associated with responsiveness to the therapy.

[0345] Accordingly, the invention also contemplates methods of correlating a biomarker profile with an effective treatment regimen for a SIRS condition selected from BaSIRS, VaSIRS, PaSIRS and InSIRS. In these embodiments, the methods may comprise: (1) determining a biomarker profile of a sample taken from a subject with the SIRS condition and for whom an effective treatment has been identified, wherein the biomarker profile comprises: (a) for each of a plurality of derived biomarkers as broadly defined above and elsewhere herein a plurality of host response specific derived biomarker values, and optionally (b) if the SIRS condition is an IpSIRS, a pathogen specific biomarker value as broadly defined above and elsewhere herein for a pathogen biomarker associated with the SIRS condition; and (2) correlating the biomarker profile so determined with an effective treatment regimen for the SIRS condition. In specific embodiments, an indicator or biomarker profile is correlated to a global probability or a particular outcome, using receiver operating characteristic (ROC) curves.

[0346] The invention further provides methods of determining whether a treatment regimen is effective for treating a subject with a SIRS condition selected from BaSIRS, VaSIRS, PaSIRS and InSIRS. In some embodiments, these methods comprise: (1) determining a post-treatment biomarker profile of a sample taken from the subject after treatment with a treatment regimen, wherein the biomarker profile comprises: (a) for each of a plurality of derived biomarkers as broadly defined above and elsewhere herein a plurality of host response specific derived biomarker values, and optionally (b) if the SIRS condition is an IpSIRS, a pathogen specific biomarker value as broadly defined above and elsewhere herein for a pathogen biomarker associated with the SIRS condition; and (2) determining a post-treatment indicator using the post-treatment biomarker profile, wherein the post-treatment indicator is at least partially indicative of the presence, absence or degree of the SIRS condition, wherein the post-treatment indicator indicates whether the treatment regimen is effective for treating the SIRS condition in the subject on the basis that post-treatment indicator indicates the presence of a healthy condition or the presence of the SIRS condition of a lower degree relative to the degree of the SIRS condition in the subject before treatment with the treatment regimen.

[0347] The invention can also be practiced to evaluate whether a subject is responding (i.e., a positive response) or not responding (i.e., a negative response) to a treatment regimen. This aspect of the invention provides methods of correlating a biomarker profile with a positive or negative response to a treatment regimen for treating a SIRS condition selected from BaSIRS, VaSIRS, PaSIRS and InSIRS. In some embodiments, these methods comprise: (1) determining a biomarker profile of a sample taken from a subject with the SIRS condition following commencement of the treatment regimen, wherein the reference biomarker profile comprises: (a) for each of a plurality of derived biomarkers as broadly defined above and elsewhere herein a plurality of host response specific derived biomarker values, and optionally (b) if the SIRS condition is an IpSIRS, a pathogen specific biomarker value as broadly defined above and elsewhere herein for a pathogen biomarker associated with the SIRS condition; and (2) correlating the sample biomarker profile with a positive or negative response to the treatment regimen

[0348] The invention also encompasses methods of determining a positive or negative response to a treatment regimen by a subject with a SIRS condition selected from BaSIRS, VaSIRS, PaSIRS and InSIRS. In some embodiments, these methods comprise: (1) correlating a reference biomarker profile with a positive or negative response to the treatment regimen, wherein the biomarker profile comprises: (a) for each of a plurality of derived biomarkers as broadly defined above and elsewhere herein a plurality of host response specific derived biomarker values, and optionally (b) if the SIRS condition is an IpSIRS, a pathogen specific biomarker value as broadly defined above and elsewhere herein for a pathogen biomarker associated with the SIRS condition; (2) detecting a biomarker profile of a sample taken from the subject, wherein the sample biomarker profile comprises (i) a plurality of host response specific derived biomarker values for each of the plurality of derived biomarkers in the reference biomarker profile, and optionally (ii) a pathogen specific biomarker value for the pathogen biomarker in the reference biomarker profile, wherein the sample biomarker profile indicates whether the subject is responding positively or negatively to the treatment regimen.

[0349] In related embodiments, the present invention further contemplates methods of determining a positive or negative response to a treatment regimen by a subject with a SIRS condition selected from BaSIRS, VaSIRS, PaSIRS and InSIRS. In some embodiments, these methods comprise: (1) correlating a reference biomarker profile with a positive or negative response to the treatment regimen, wherein the biomarker profile comprises: (a) for each of a plurality of derived biomarkers as broadly defined above and elsewhere herein a plurality of host response specific derived biomarker values, and optionally (b) a pathogen specific biomarker value as broadly defined above and elsewhere herein for a pathogen biomarker associated with the SIRS condition; (2) detecting a biomarker profile of a sample taken from the subject, wherein the sample biomarker profile comprises (i) a plurality of host response specific derived biomarker values for each of the plurality of derived biomarkers in the reference biomarker profile, and optionally (ii) if the SIRS condition is an IpSIRS, a pathogen specific biomarker value for the pathogen biomarker in the reference biomarker profile, wherein the sample biomarker profile indicates whether the subject is responding positively or negatively to the treatment regimen.

[0350] The invention also contemplates methods of determining a positive or negative response to a treatment regimen by a subject with a SIRS condition selected from BaSIRS, VaSIRS, PaSIRS and InSIRS. In certain embodiments, these methods comprise: (1) obtaining a biomarker profile of a sample taken from the subject following commencement of the treatment regimen, wherein the biomarker profile comprises: (a) for each of a plurality of derived biomarkers as broadly defined above and elsewhere herein a plurality of host response specific derived biomarker values, and optionally (b) if the SIRS condition is an IpSIRS, a pathogen specific biomarker value as broadly defined above and elsewhere herein for a pathogen biomarker associated with the SIRS condition, wherein the sample biomarker profile is correlated with a positive or negative response to the treatment regimen; and (2) and determining whether the subject is responding positively or negatively to the treatment regimen.

[0351] The above methods can be practiced to identify responders or non-responders relatively early in the treatment process, i.e., before clinical manifestations of efficacy. In this way, the treatment regimen can optionally be discontinued, a different treatment protocol can be implemented and/or supplemental therapy can be administered. Thus, in some embodiments, a sample BaSIRS, VaSIRS, PaSIRS, InSIRS in combination with BIP, VIP or PIP biomarker profile is obtained within about 2 hours, 4 hours, 6 hours, 12 hours, 1 day, 2 days, 3 days, 4 days, 5 days, 1 week, 2 weeks, 3 weeks, 4 weeks, 6 weeks, 8 weeks, 10 weeks, 12 weeks, 4 months, six months or longer of commencing therapy.

### 4. Device Embodiments

[0352] The present invention also contemplates embodiments in which the indicator-determining method of the invention is implemented using one or more processing devices. In representative embodiments of this type, the method that is implemented by the processing device(s) determines an indicator used in assessing a likelihood of a subject having a presence, absence or degree of BaSIRS or VaSIRS, wherein the method comprises: (1) determining a plurality of host response specific biomarker values including a plurality of BaSIRS biomarker values and a plurality of VaSIRS biomarker values, the plurality of BaSIRS biomarker values being indicative of values measured for a corresponding plurality of BaSIRS biomarkers in a sample taken from the subject, the plurality of VaSIRS biomarker values being indicative of values measured for a corresponding plurality of VaSIRS biomarkers in the sample; (2) determining a plurality of host response specific derived biomarker values including at least one BaSIRS derived biomarker value and at least one VaSIRS derived biomarker value, each derived BaSIRS biomarker value being determined using at least a subset of the plurality of BaSIRS biomarker values, and being indicative of a ratio of levels of a corresponding at least a subset of the plurality of BaSIRS biomarkers, and each derived VaSIRS biomarker value being determined using at least a subset of the plurality of VaSIRS biomarker values, and being indicative of a ratio of levels of a corresponding at least a subset of the plurality of VaSIRS biomarkers; (3) determining the indicator using the plurality of host response specific derived biomarker values, wherein the at least a subset of BaSIRS biomarkers forms a BaSIRS derived biomarker combination which is not a derived biomarker combination for VaSIRS, PaSIRS or InSIRS, and wherein the at least a subset of VaSIRS biomarkers forms a VaSIRS derived biomarker combination which is not a derived biomarker combination for BaSIRS, PaSIRS or InSIRS, wherein the BaSIRS derived biomarker combination is suitably selected from TABLE A and wherein the VaSIRS derived biomarker combination is suitably selected from TABLE B; (4) retrieving previously determined indicator references from a database, the indicator references being determined based on indicators determined from a reference population consisting of individuals diagnosed with BaSIRS or VaSIRS; (5) comparing the indicator to the indicator references to thereby determine a probability indicative of the subject having or not having BaSIRS or VaSIRS; and (6) generating a representation of the probability, the representation being displayed to a user to allow the user to assess the likelihood of a biological subject having BaSIRS or VaSIRS.

[0353] In some embodiments, the indicator-determining method that is implemented by the processing device(s) determines an indicator used in assessing a likelihood of a subject having a presence, absence or degree of BaSIRS, VaSIRS or PaSIRS, wherein the method comprises: (1) determining a plurality of host response specific biomarker values including a plurality of BaSIRS biomarker values, a plurality of VaSIRS biomarker values and a plurality of PaSIRS biomarker values, the plurality of BaSIRS biomarker values being indicative of values measured for a corresponding plurality of BaSIRS biomarkers in a sample taken from the subject, the plurality of VaSIRS biomarker values being indicative of values measured for a corresponding plurality of VaSIRS biomarkers in the sample, and the plurality of PaSIRS biomarker values being indicative of values measured for a corresponding plurality of PaSIRS biomarkers in the sample; (2) determining a plurality of host response specific derived biomarker values including at least one BaSIRS derived biomarker value, at least one VaSIRS derived biomarker value and at least one PaSIRS derived biomarker value, each derived BaSIRS biomarker value being determined using at least a subset of the plurality of BaSIRS biomarker values, and being indicative of a ratio of levels of a corresponding at least a subset of the plurality of BaSIRS biomarkers, each derived VaSIRS biomarker value being determined using at least a subset of the plurality of VaSIRS biomarker values, and being indicative of a ratio of levels of a corresponding at least a subset of the plurality of VaSIRS biomarkers, and each derived PaSIRS biomarker value being determined using at least a subset of the plurality of PaSIRS biomarker values, and being indicative of a ratio of levels of a corresponding at least a subset of the plurality of PaSIRS biomarkers; (3) determining the indicator using the plurality of host response specific derived biomarker values, wherein the at least a subset of BaSIRS biomarkers forms a BaSIRS derived biomarker combination which is not a derived biomarker combination for VaSIRS, PaSIRS or InSIRS, wherein the at least a subset of VaSIRS biomarkers forms a VaSIRS derived biomarker combination which is not a derived biomarker combination for BaSIRS, PaSIRS or InSIRS, and wherein the at least a subset of PaSIRS biomarkers forms a PaSIRS derived biomarker combination which is not a derived biomarker combination for BaSIRS, VaSIRS or InSIRS, wherein the BaSIRS derived biomarker combination is suitably selected from TABLE A, wherein the VaSIRS derived biomarker combination is suitably selected from TABLE B, and wherein the PaSIRS derived biomarker combination is suitably selected from TABLE C; (4) retrieving previously determined indicator references from a database, the indicator references being determined based on indicators determined from a reference population consisting of individuals diagnosed with BaSIRS, VaSIRS or PaSIRS; (5) comparing the indicator to the indicator references to thereby determine a probability indicative of the subject having or not having BaSIRS, VaSIRS or PaSIRS; and (6) generating a representation of the probability, the representation being displayed to a user to allow the user to assess the likelihood of a biological subject having BaSIRS, VaSIRS or PaSIRS.

[0354] In other embodiments, the method that is implemented by the processing device(s) determines an indicator used in assessing a likelihood of a subject having a presence, absence or degree of BaSIRS, VaSIRS or InSIRS, wherein the method comprises: (1) determining a plurality of host response specific biomarker values including a plurality of BaSIRS biomarker values, a plurality of VaSIRS biomarker values and a plurality of InSIRS biomarker values, the plurality of BaSIRS biomarker values being indicative of values measured for a corresponding plurality of BaSIRS biomarkers in a sample taken from the subject, the plurality of VaSIRS biomarker values being indicative of values measured for a corresponding plurality of VaSIRS biomarkers in the sample, and the plurality of InSIRS biomarker values being indicative of values measured for a corresponding plurality of InSIRS biomarkers in the sample; (2) determining a plurality of host response specific derived biomarker values including at least one BaSIRS derived biomarker value, at least one VaSIRS derived biomarker value and at least one InSIRS derived biomarker value, each derived BaSIRS biomarker value being determined using at least a subset of the plurality of BaSIRS biomarker values, and being indicative of a ratio of levels of a corresponding at least a subset of the plurality of BaSIRS biomarkers, each derived VaSIRS biomarker value being determined using at least a subset of the plurality of VaSIRS biomarker values, and being indicative of a ratio of levels of a corresponding at least a subset of the plurality of VaSIRS biomarkers, and each derived InSIRS biomarker value being determined using at least a subset of the plurality of InSIRS biomarker values, and being indicative of a ratio of levels of a corresponding at least a subset of the plurality of InSIRS biomarkers; (3) determining the indicator using the plurality of host response specific derived biomarker values, wherein the at least a subset of BaSIRS biomarkers forms a BaSIRS derived biomarker combination which is not a derived biomarker combination for VaSIRS, PaSIRS or InSIRS, wherein the at least a subset of VaSIRS biomarkers forms a VaSIRS derived biomarker combination which is not a derived biomarker combination for BaSIRS, PaSIRS or InSIRS, and wherein the at least a subset of InSIRS biomarkers forms a InSIRS derived biomarker combination which is not a derived biomarker combination for BaSIRS, VaSIRS or PaSIRS, wherein the BaSIRS derived biomarker combination is suitably selected from TABLE A, wherein the VaSIRS derived biomarker combination is suitably selected from TABLE B, and wherein the InSIRS derived biomarker combination is suitably selected from TABLE D; (4) retrieving previously determined indicator references from a database, the indicator references being determined based on indicators determined from a reference population consisting of individuals diagnosed with BaSIRS, VaSIRS or InSIRS; (5) comparing the indicator to the indicator references to thereby determine a probability indicative of the subject having or not having BaSIRS, VaSIRS or InSIRS; and (6) generating a representation of the probability, the representation being displayed to a user to allow the user to assess the likelihood of a biological subject having BaSIRS, VaSIRS or InSIRS.

[0355] In still other embodiments, the method that is implemented by the processing device(s) determines an indicator used in assessing a likelihood of a subject having a presence, absence or degree of BaSIRS, VaSIRS, PaSIRS or InSIRS, wherein the method comprises: (1) determining a plurality of host response specific biomarker values including a plurality of BaSIRS biomarker values, a plurality of VaSIRS biomarker values, a plurality of PaSIRS biomarker values and a plurality of InSIRS biomarker values, the plurality of BaSIRS biomarker values being indicative of values measured for a corresponding plurality of BaSIRS biomarkers in a sample taken from the subject, the plurality of VaSIRS biomarker values being indicative of values measured for a corresponding plurality of VaSIRS biomarkers in the sample, the plurality of PaSIRS biomarker values being indicative of values measured for a corresponding plurality of PaSIRS biomarkers in the sample, and the plurality of InSIRS biomarker values being indicative of values measured for a corresponding plurality of InSIRS biomarkers in the sample; (2) determining a plurality of host response specific derived biomarker values including at least one BaSIRS derived biomarker value, at least one VaSIRS derived biomarker value, at least one PaSIRS derived biomarker value and at least one InSIRS derived biomarker value, each derived BaSIRS biomarker value being determined using at least a subset of the plurality of BaSIRS biomarker values, and being indicative of a ratio of levels of a corresponding at least a subset of the plurality of BaSIRS biomarkers, each derived VaSIRS biomarker value being determined using at least a subset of the plurality of VaSIRS biomarker values, and being indicative of a ratio of levels of a corresponding at least a subset of the plurality of VaSIRS biomarkers, each derived PaSIRS biomarker value being determined using at least a subset of the plurality of PaSIRS biomarker values, and being indicative of a ratio of levels of a corresponding at least a subset of the plurality of PaSIRS biomarkers, and each derived InSIRS biomarker value being determined using at least a subset of the plurality of InSIRS biomarker values, and being indicative of a ratio of levels of a corresponding at least a subset of the plurality of InSIRS biomarkers; (3) determining the indicator using the plurality of host response specific derived biomarker values, wherein the at least a subset of BaSIRS biomarkers forms a BaSIRS derived biomarker combination which is not a derived biomarker combination for VaSIRS, PaSIRS or InSIRS, wherein the at least a subset of VaSIRS biomarkers forms a VaSIRS derived biomarker combination which is not a derived biomarker combination for BaSIRS, PaSIRS or InSIRS, wherein the at least a subset of PaSIRS biomarkers forms a PaSIRS derived biomarker combination which is not a derived biomarker combination for BaSIRS, VaSIRS or InSIRS, and wherein the at least a subset of InSIRS biomarkers forms a InSIRS derived biomarker combination which is not a derived biomarker combination for BaSIRS, VaSIRS or PaSIRS, wherein the BaSIRS derived biomarker combination is suitably selected from TABLE A, wherein the VaSIRS derived biomarker combination is suitably selected from TABLE B, wherein the PaSIRS derived biomarker combination is suitably selected from TABLE C, and wherein the InSIRS derived biomarker combination is suitably selected from TABLE D; (4) retrieving previously determined indicator references from a database, the indicator references being determined based on indicators determined from a reference population consisting of individuals diagnosed with BaSIRS, VaSIRS, PaSIRS or InSIRS; (5) comparing the indicator to the indicator references to thereby determine a probability indicative of the subject having or not having BaSIRS, VaSIRS, PaSIRS or InSIRS; and (6) generating a representation of the probability, the representation being displayed to a user to allow the user to assess the likelihood of a biological subject having BaSIRS, VaSIRS, PaSIRS or InSIRS.

[0356] In any of the above embodiments, the method that is implemented by the processing device(s) determines an indicator used in assessing a likelihood of a subject having a presence, absence or degree of BaSIRS or VaSIRS, or optionally one of PaSIRS or InSIRS, wherein the methods further comprise: (a) determining a plurality of pathogen specific biomarker values including at least one bacterial biomarker value and at least one viral biomarker value, and optionally at least one protozoal biomarker value, the least one bacterial biomarker value being indicative of a value measured for a corresponding bacterial biomarker in the sample, the least one viral biomarker value being indicative of a value measured for a corresponding viral biomarker in the sample, and the least one protozoal biomarker value being indicative of a value measured for a corresponding protozoal biomarker in the sample; (b) determining the indicator using the host response specific derived biomarker values in combination with the pathogen specific biomarker values; (c) retrieving previously determined indicator references from a database, the indicator references being determined based on indicators determined from a reference population consisting of individuals diagnosed with BaSIRS, VaSIRS or optionally one of PaSIRS or InSIRS; (d) comparing the indicator to the indicator references to thereby determine a probability indicative of the subject having or not having BaSIRS, VaSIRS, PaSIRS or InSIRS; and (6) generating a representation of the probability, the representation being displayed to a user to allow the user to assess the likelihood of the subject having BaSIRS or VaSIRS, or optionally one of PaSIRS or InSIRS.

[0357] Similarly apparatus can be provided for determining the likelihood of a subject having BaSIRS or VaSIRS, or optionally one of PaSIRS or InSIRS, the apparatus including: (A) a sampling device that obtains a sample taken from a subject, the sample including a plurality of host response specific biomarkers, and optionally at least one pathogen specific biomarker selected from BIP and VIP biomarkers, and optionally PIP biomarkers, wherein the host response specific biomarkers include a plurality of BaSIRS biomarkers, a plurality of VaSIRS biomarkers, and optionally one or both of a plurality of PaSIRS biomarkers and a plurality of InSIRS biomarkers; (B) a measuring device that quantifies for each of the host response specific biomarkers within the sample a corresponding host response specific biomarker value, and optionally that quantifies for each of the pathogen specific biomarkers within the sample a corresponding pathogen specific biomarker value; (C) at least one processing device that: (i) receives the host response specific biomarker values, and optionally receives the pathogen specific biomarker values from the measuring device; (ii) determines for at least a subset of the plurality of biomarker values of a specific SIRS type, a host response specific derived biomarker value indicative of a ratio of levels of a corresponding at least a subset of the plurality of host response specific biomarkers; (iii) determines an indicator that is at least partially indicative of the presence, absence or degree of BaSIRS or VaSIRS, or optionally one of PaSIRS or InSIRS using the host response specific derived biomarker values in combination with the pathogen specific biomarker values; (iv) compares the indicator to at least one indicator reference; (v) determines a likelihood of the subject having or not having a BaSIRS, VaSIRS, or optionally one of PaSIRS or InSIRS using the results of the comparison; and (v) generates a representation of the indicator and the likelihood for display to a user.

[0358] In order that the invention may be readily understood and put into practical effect, particular preferred embodiments will now be described by way of the following non-limiting examples.

### EXAMPLES

### Example 1

### General Approach—BaSIRS, VaSIRS, PaSIRS and InSIRS Host Response Specific Biomarker Derivation (Derived Biomarkers)

[0359] An illustrative process for the identification of BaSIRS, VaSIRS, PaSIRS and InSIRS host response biomarkers for use in diagnostic algorithms will now be described.

[0360] Gene expression data (derived from clinical trials performed by the inventors and/or from Gene Expression Omnibus) were analyzed using a variety of statistical approaches to identify derived biomarkers (ratios) and largely follows the method described in WO 2015/117204. Individual and derived markers were graded based on performance (Area Under Curve). Datasets derived from GEO (which are all MIAME-compliant) were used with the following restrictions; peripheral blood samples were used, appropriate controls were used, an appropriate number of samples were used to provide significance following False-Discovery Rate (FDR) adjustment, all data passed standard quality control metrics, principle component analysis did not reveal any artifacts or potential biases. The datasets were allocated into two groups (or combined samples from all datasets split evenly into two groups)—“discovery” and “validation”. The datasets in the “discovery” groups were deliberately chosen to enable the identification of specific BaSIRS, VaSIRS, PaSIRS and InSIRS biomarker profiles that could be used generically for a variety of known bacterial pathogens that cause BaSIRS, all Baltimore virus classification groups and across different mammalian species, a variety of protozoans with high morbidity that cause systemic inflammation and a variety of different non-infectious SIRS conditions. The studies therefore included; (a) for BaSIRS; Gram positive and Gram negative bacteria, a variety of different affected body systems, across a range of severity (b) for VaSIRS; DNA and RNA viruses, multiple mammalian species (human, macaque, chimpanzee, pig, mice, rat), high likelihood of generating a systemic inflammatory response (c) for PaSIRS; a variety of malarial (Plasmodium) species, a variety of protozoal species including Plasmodium, Leishmania and Toxoplasma (d) for InSIRS; a variety of non-infectious causes of systemic inflammation (e.g., trauma, asthma, allergy, cancer). For all studies the following parameters were also considered to be important: experimentally-infected subjects where a control sample was taken prior to inoculation, samples taken over time, in particular early-stage samples with a low likelihood of secondary complications from other infections (e.g., viral etiology with a secondary bacterial infection or a protozoan infection with a secondary bacterial infection).

[0361] Prior to analysis each dataset was filtered to include only the top genes (usually between 3000 and 6000 (of 35,000) depending upon data quality, level of expression and commonality across the datasets) as measured by the mean gene expression level across all samples in the dataset. This ensured that only those genes with relatively strong expression were analyzed and that a limited number of candidates were taken forward to the next compute-time intensive step. Receiver Operating Characteristic (ROC) curves and the area under theses curves (also referred to herein as Area Under Curve (AUC)) were then calculated across all derived biomarkers using the difference in the log 2 of the expression values for each derived biomarker. This resulted in approximately 36,000,000 (6000×5999) derived biomarkers per dataset. An AUC>0.5 was defined as a derived biomarker value being higher in cases than controls, i.e. where the numerator is potentially up-regulated in cases and/or the denominator is potentially down-regulated in cases. Generally, a ‘numerator’ biomarker of an individual biomarker pair disclosed herein is up-regulated or expressed at a higher level relative to a control (e.g., a healthy control) and a ‘denominator’ biomarker of the biomarker pair is unchanged or expressed at about the same level, or is down-regulated or expressed at a lower level, relative to a control (e.g., a healthy control). “Discovery” datasets were then combined by taking the mean AUC for each derived biomarker. Resulting derived biomarkers were then filtered by keeping only those with a mean AUC greater than a pre-determined threshold across all relevant datasets relevant to each of BaSIRS, VaSIRS, PaSIRS and InSIRS. The pool of remaining derived biomarkers after this step was a small percentage of the original number but still contained a large number of derived biomarkers with many that were common to each of the conditions of BaSIRS, VaSIRS, PaSIRS and InSIRS.

[0362] To ensure that the derived biomarkers were specific to either bacterial, viral, protozoan or non-infectious systemic inflammation a number of additional datasets (listed in TABLES 13, 18, 22 and 23) were used to identify derived biomarkers of generalized, non-infectious and infectious inflammation. Appropriate datasets from this list were used to provide specificity—by example, for identification of specific VaSIRS derived biomarkers datasets for systemic inflammation other than VaSIRS were used, and for identification of specific BaSIRS derived biomarkers datasets for systemic inflammation other than BaSIRS were used. These datasets were subjected to the same restrictions as the “discovery” and “validation” datasets including; peripheral blood samples were used, appropriate controls were used, an appropriate number of samples were used to provide significance following False-Discovery Rate (FDR) adjustment, all data passed standard quality control metrics, principle component analysis did not reveal any artifacts or potential biases. Derived biomarkers that had strong performance, based on an AUC threshold in more than a set number of these individual datasets, were removed (“subtracted”) from the list of identified BaSIRS, VaSIRS, PaSIRS or InSIRS derived biomarkers to ensure specificity Each unique pool of biomarkers, one for each of BaSIRS, VaSIRS, PaSIRS and InSIRS, was then taken forward to the next steps (validation and greedy search). Without this “subtraction” step derived biomarkers common to the SIRS conditions would be taken forward, which would result in different outcomes with respect to AUC performance of derived biomarkers and the final selection of the best combination of derived biomarkers (see Example 2).

[0363] A further filtering step was then applied. Only derived biomarkers with an AUC greater than a set threshold in a set number of the discovery and validation datasets for each condition (BaSIRS, VaSIRS, PaSIRS, InSIRS) were retained. Generally, a cut-off of around AUC of 0.75 or higher was chosen for the following reasons: 1). simple diagnostic heuristics for the diagnosis of influenza have an AUC between 0.7 and 0.79 (Ebell, M. H., & Afonso, A. (2011). A Systematic Review of Clinical Decision Rules for the Diagnosis of Influenza. The Annals of Family Medicine, 9(1), 69-77); 2). clinicians can predict patients that are ultimately blood culture positive from those with suspected infection with an AUC of 0.77 (Fischer, J. E., Harbarth, S., Agthe, A. G., Benn, A., Ringer, S. A., Goldmann, D. A., & Fanconi, S. (2004). Quantifying uncertainty: physicians' estimates of infection in critically ill neonates and children. Clinical Infectious Diseases: an Official Publication of the Infectious Diseases Society of America, 38(10), 1383-1390); 3). The use of polymerase chain reaction-based tests, compared to conventional tests, for respiratory pathogens in patients with suspected lower respiratory tract infections (LRTI) increased the diagnostic yield from 21% to 43% of cases (that is, molecular-based pathogen tests in this study only detected a pathogen in 43% of suspected LRTI) (Oosterheert, J. J., van Loon, A. M., Schuurman, R., Hoepelman, A. I. M., Hak, E., Thijsen, S., et al. (2005). Impact of rapid detection of viral and atypical bacterial pathogens by real-time polymerase chain reaction for patients with lower respiratory tract infection. Clinical Infectious Diseases, 41(10), 1438-1444); 4). the sensitivity of point-of-care tests for influenza is about 70% (Foo, H., & Dwyer, D. E. (2009). Rapid tests for the diagnosis of influenza. Australian Prescriber 32:64-67); 5). The performance of clinical algorithms and lack of trust in diagnostic tests for diagnosing malaria in febrile children in high incidence areas does not result or warrant the withholding anti-malarial drugs (Chandramohan, D., Jaffar, S., & Greenwood, B. (2002). Use of clinical algorithms for diagnosing malaria. Tropical Medicine & International Health: TM & IH, 7(1), 45-52; Bisoffi, Z., Sirima, B. S., Angheben, A., Lodesani, C., Gobbi, F., Tinto, H., & Van den Ende, J. (2009). Rapid malaria diagnostic tests vs. clinical management of malaria in rural Burkina Faso: safety and effect on clinical decisions. A randomized trial. Tropical Medicine & International Health: TM & IH, 14(5), 491-498; Amexo, M., Tolhurst, R., Barnish, G., & Bates, I. (2004). Malaria misdiagnosis: effects on the poor and vulnerable. The Lancet, 364(9448), 1896-1898). Thus, current existing diagnostic procedures and tests for bacterial, viral or protozoan infections do not have either good diagnostic performance or clinician trust, and in many instances no pathogen or antibody response is detected in samples taken at the time a patient presents with clinical signs. BaSIRS, VaSIRS, PaSIRS or InSIRS signatures with an AUC of at least 0.75 will therefore likely have greater clinical utility than most existing bacterial, viral or protozoal diagnostic assays, and at the critical time when the patient presents with clinical signs. Following this filtering step, usually a limited number of derived biomarkers remained, which were considered to be specific to the condition under investigation.

### Example 2

### BaSIRS, VaSIRS, PaSIRS and InSIRS Host Response Biomarker Derivation (General Approach—Combination of Derived Biomarkers)

[0364] Next, a search for the best combination and number of derived biomarkers for each of BaSIRS, VaSIRS, PaSIRS and InSIRS in each of the derived biomarker pools was performed with the aim of finding a minimal set of derived biomarkers with optimal commercial utility. Optimal commercial utility in this instance means consideration of the following non-limiting factors; diagnostic performance, clinical utility, diagnostic noise (introduced by using too many derived biomarkers), transferability to available molecular chemistries (e.g., PCR, microarray, DNA sequencing), transferability to available point-of-care platforms (e.g., Biocartis Idylla, Cepheid GeneXpert, Becton Dickinson BD Max, Curetis Unyvero, Oxford Nanopore Technologies MinION), cost of assay manufacture (the more reagents and biomarkers the larger the cost), ability to multiplex biomarkers, availability of suitable reporter dyes, complexity of results interpretation.

[0365] To be able to determine the best combination of derived markers all study datasets for each of BaSIRS, VaSIRS, PaSIRS or InSIRS needed to be combined. As such, each dataset was normalized individually using mean centering to zero and variance set to one. The mean of a biomarker in a dataset was calculated in three steps: (a) calculation of the mean of the cases, (b) calculation of the mean of the controls, and (c) calculation of the mean of the preceding two values. Once the mean for each biomarker had been calculated, the expression value for that biomarker in each sample was adjusted by subtracting the mean value. The values were further adjusted by dividing by the variance. This was performed for all biomarker expression values for every sample in every dataset. All of the datasets for each condition category were then combined into four separate (bacterial, viral, protozoal and InSIRS) expression matrices.

[0366] Following normalization, a search (greedy) for the best performing pair of derived biomarkers was performed (by AUC in the normalized dataset) using the corresponding specific derived biomarker pool for each of the bacterial, viral, protozoal and InSIRS expression matrices. This was accomplished by first identifying the best performing derived biomarker. Each of the other remaining derived biomarkers was then added and, as long as neither biomarker in the newly added derived biomarker was already part of the first derived biomarker, the AUC was calculated. This process continued and an AUC plot was generated based on sequential adding of derived biomarkers.

### Example 3

### Host Response Specific Biomarkers are Grouped Based on their Correlation to BaSIRS (OPLAH, ZHX2, TSPO, HCLS1), VaSIRS (ISG15, IL16, OASL and ADGRE5), PaSIRS (TTC17, G6PD, HERC6, LAP3, NUP160 and TPP1) and InSIRS (ARL6IP5, ENTPD1, HEATR1 and TNFSF8) Biomarkers, and Based on Greedy Search Results

[0367] The individual host response specific biomarkers in the signature for BaSIRS are: TSPO, HCLS1, OPLAH and ZHX2. The individual host response specific biomarkers in the signature for VaSIRS are: ISG15, IL16, OASL and ADGRE5. The individual host response specific biomarkers in the signature for PaSIRS are: TTC17, G6PD, HERC6, LAP3, NUP160 and TPP1. The individual host response specific biomarkers in the signature for InSIRS are: ARL6IP5, ENTPD1, HEATR1 and TNFSF8. There were 94, 413, 130 and 151 unique biomarkers in the lists of 102, 473, 523 and 164 host response specific derived biomarkers with an AUC over a set threshold for BaSIRS, VaSIRS, PaSIRS and InSIRS, respectively. For each unique biomarker, a correlation coefficient was calculated.

[0368] Two pairs of derived biomarkers (OPLAH/ZHX2; TSPO/HCLS1) were discovered that provided the highest AUC across all of the bacterial datasets studied after non-bacterial derived biomarkers had been subtracted. Biomarkers as ratios that provided an AUC above a set threshold were then allocated to one of four Groups, as individual biomarkers, based on their correlation to either OPLAH (Group A BaSIRS biomarkers), ZHX2 (Group B BaSIRS biomarkers), TSPO (Group C BaSIRS biomarkers) or HCSL1 (Group D BaSIRS biomarkers), as presented in TABLE 24.

[0369] Two pairs of derived biomarkers (IL16/ISG15; ADGRE5/OASL) were discovered that provided the highest AUC across all of the viral datasets studied after non-viral derived biomarkers had been subtracted. Biomarkers as ratios that provided an AUC above a set threshold were then allocated to one of four Groups, as individual biomarkers, based on their correlation to either ISG15 (Group A VaSIRS biomarkers), IL16 (Group B VaSIRS biomarkers), OASL (Group C VaSIRS biomarkers) or ADGRE5 (Group D VaSIRS biomarkers), as presented in TABLE 26.

[0370] Three pairs of derived biomarkers (TTC17/G6PD; HERC6/LAP3; NUP160/TPP1) were discovered that provided the highest AUC across all of the protozoan datasets studied after non-protozoan derived biomarkers had been subtracted. Biomarkers as ratios that provided an AUC above a set threshold were then allocated to one of six Groups, as individual biomarkers, based on their correlation to either TTC17 (Group A PaSIRS biomarkers), G6PD (Group B PaSIRS biomarkers), HERC6 (Group C PaSIRS biomarkers), LAP3 (Group D PaSIRS biomarkers), NUP160 (Group E PaSIRS biomarkers) or TPP1 (Group F PaSIRS biomarkers), as presented in TABLE 27.

[0371] Two pairs of derived biomarkers (ARL6IP5/ENTPD1; HEATR1/TNFSF8) were discovered that provided the highest AUC across all of the InSIRS datasets studied after infectious SIRS (bacterial, viral, protozoal) derived biomarkers had been subtracted. Biomarkers as ratios that provided an AUC above a set threshold were then allocated to one of four Groups, as individual biomarkers, based on their correlation to either ARL6IP5 (Group A InSIRS biomarkers), ENTPD1 (Group B InSIRS biomarkers), HEATR1 (Group C InSIRS biomarkers) or TNFSF8 (Group D InSIRS biomarkers), as presented in TABLE 28.

[0372] Following greedy searches, the best host response derived biomarkers, including any combination of such biomarkers, for BaSIRS, VaSIRS, PaSIRS and InSIRS are:
[0373] BaSIRS—TSPO:HCLS1, OPLAH:ZHX2, TSPO:RNASE6, GAS7:CAMK1D, STGAL2:PRKD2, PCOLE2:NMUR1, CR1:HAL
[0374] VaSIRS—ISG15:1L16, OASL:ADGRE5, TAP1:TGFBR2, IFIH1:CRLF3, IFI44:IL4R, EIFAK2:SYPL1, OAS2:LEF1, STAT1/PCBP2
[0375] PaSIRS—TTC17:G6PD, HERC6:LAP3, NUP160:TPP1, RPL15:GP1, ARID1A:CSTB,
[0376] AHCTF1:WARS, FBXO11:TANK, ADSL:ENO1, RPL9:TNIP1, ASXL2:IRF1.
[0377] InSIRS—ENTPD1:ARL6IP5, TNFSF8:HEATR1, ADAM19:POLR2A, SYNE2:VPS13C,
[0378] TNFSF8: NIP7, CDA: EFHD2, ADAM19:MLLT10, CDA: PTGS1, ADAM19:EXOC7, TNFSF8:TRIP11.

### Example 4

### BaSIRS Host Response Biomarker Derivation

[0379] A step-wise procedure was undertaken to identify biomarkers useful in determining a host systemic immune response to bacterial infection, which largely employs the same steps that were used to identify host systemic immune response biomarkers of viral infection, as described in Australian provisional patent application 2015903986.

[0380] In brief, bacterial derived biomarkers were discovered that are capable of determining a specific mammalian systemic host response to bacteria. This was achieved using a step-wise approach of derived biomarker discovery, subtraction and validation. Data pre-processing included; log 2 transformation (if gene expression data was from arrays), choice of the most intense probe to represent a gene, and choice of those ˜40% of genes with the largest variance within our own in-house datasets, which equalled approximately 3700 genes (which were then applied to publicly available datasets).

[0381] Discovery of a large pool of derived biomarkers was performed using carefully selected samples from in-house datasets (“Fever”, “MARS” and “GAPPSS”, n=6) and Gene Expression Omnibus (GSE) datasets (n=7)). Samples were pre-selected and categorized into InSIRS or BaSIRS using other known host response signatures and then split into two groups used for either “discovery” (n=984) or “validation” (n=1045) (see TABLES 11 and 12 for details on the datasets and samples in each group).

[0382] Derived biomarkers were computed for every combination in both the Discovery and Validation datasets, resulting in a total of 13,671,506 binary combinations. A total of 255 derived biomarkers had an AUC>0.8 across all discovery datasets and 102 that had an AUC>0.85 across the validation datasets (see TABLE 15). These same 102 derived biomarkers were then tested on other datasets containing samples derived from subjects with systemic inflammation not related to BaSIRS (see TABLE 13 for a list of these datasets). Other non-BaSIRS systemic conditions in these datasets included; viral infection, asthma, coronary artery disease, stress, sarcoidosis and cancer. The mean AUC range for the 102 derived biomarkers across these datasets was between 0.28 and 0.53 indicating specificity of the derived biomarkers for BaSIRS.

[0383] Datasets were then merged so that a greedy search could be performed with the aim of finding the best combination of derived biomarkers for separating InSIRS and BaSIRS subjects. Merging of datasets was achieved in the following manner. Each dataset was normalized by mean centering to zero and forcing gene variance to one as follows: The mean of a gene in a dataset was calculated in three steps: (a) calculation of the mean of the cases, (b) calculation of the mean of the controls, and (c) calculation of the mean of those two values. Once the mean was calculated, the expression values for that gene in each sample were adjusted by subtracting the mean value. An expression matrix was then standardized to unit variance by dividing by the genes variance. All datasets were then combined into a single “expression” matrix after normalizing each dataset individually. The matrix had dimensions of 102 biomarkers and 984 samples.

[0384] The best combinations of derived ratios were then determined using a greedy search. A number of factors, including the use of a limited number of derived biomarkers, ease of porting onto a Point-of-Care platform, and performance based on AUC, were used to select the final combination of derived biomarkers. FIG. 1 and TABLE 29 show the AUC performance of the successive addition of individual derived biomarkers in the balanced-scale discovery datasets. The final BaSIRS signature chosen was OPLAH/ZHX2:TSPO/HCLS1 which had an AUC in the balance-scaled data of 0.863. Performance of this signature in each of the individual un-scaled (i.e. raw data) Validation, Discovery and non-BaSIRS datasets is shown in TABLE 14. The mean AUC for this signature in the Discovery, Validation and Non-BaSIRS datasets was 0.923, 0.880 and 0.614 respectively. The performance of this signature is also demonstrated in graphical form in FIGS. 2-5.

[0385] Some numerators and denominators occurred more often in the 102 derived biomarkers, perhaps indicating that specific pathways are involved in the immune response to bacteria, or that some biomarkers are expressed in such a manner that makes them more suitable as a numerator or denominator. TABLE 30 lists those individual BaSIRS biomarkers that appear more than once as either a numerator or denominator that are a component of the 102 derived biomarkers with a mean AUC>0.85.

### Example 5

### VaSIRS Host Response Biomarker Derivation

[0386] A step-wise procedure was undertaken to identify biomarkers useful in determining a host systemic immune response to viral infection which largely the same as described in Australian provisional patent application 2015903986.

[0387] In brief, “pan-viral” derived biomarkers were discovered that are capable of determining a specific mammalian systemic host response to viruses belonging to any of the seven Baltimore virus classification groups. This was achieved using a step-wise approach of derived biomarker discovery, subtraction and validation. Discovery of a large pool of derived biomarkers was performed using a set of four “core” datasets containing samples from subjects with no known infectious co-morbidities and a confirmed viral infection. Derived biomarkers in this large pool were then removed, or subtracted, if they had diagnostic performance, above a set threshold, in other datasets containing samples derived from subjects with other systemic inflammatory conditions, such as bacterial sepsis, allergy, autoimmune disease and sarcoidosis. Derived biomarkers for age, gender, body mass index and race were also subtracted from the pool. Following these steps there remained a total of 473 derived biomarkers with an AUC>0.8 in at least 11 of 14 individual viral datasets (see TABLE 20 for a list of these derived biomarkers and their performance). Using a greedy search on combined datasets, derived biomarkers and combinations of derived biomarkers were then identified that provided good diagnostic performance (AUC=0.936) in the viral datasets (n=14) (See FIG. 6 and TABLE 31). Validation of the diagnostic performance of a “pan-viral” signature, composed of the two derived biomarkers of ISG15/IL16 and OASL/ADGRE5, in a number of other validation datasets was then determined and some results are shown in FIGS. 7-13. Thus, the combination of four biomarkers consisting of ISG15/IL16 and OASL/ADGRE5, and other biomarkers correlated to each of these individual biomarkers, is considered to be a “pan-viral” diagnostic signature that provides strong diagnostic performance across various mammals, including humans, and across different virus types based on Baltimore classification groups I-VII.

[0388] Some numerators and denominators occurred more often in the 473 derived biomarkers, perhaps indicating that specific pathways are involved in the immune response to viruses, or that some biomarkers are expressed in such a manner that makes them more suitable as a numerator or denominator. TABLE 31 lists those individual VaSIRS biomarkers that appear more than once as either a numerator or denominator that are a component of the 473 derived biomarkers with a mean AUC>0.8.

### Example 6

### PaSIRS Host Response Biomarker Derivation

[0389] A step-wise procedure was undertaken to identify biomarkers useful in determining a host systemic immune response to protozoal infection.

[0390] Four suitable datasets were identified in Gene Expression Omnibus covering studies on malaria and leishmania protozoal organisms—see TABLE 21 for details of the number and type of samples in each patient cohort for biomarker discovery. The data was preprocessed by cleaning duplicate genes and performing balanced univariate scaling on all the datasets. All the datasets were then merged by gene name which resulted in 4421 potential target genes.

[0391] AUCs were then calculated for all possible combinations of two biomarkers (19,540,820 derived biomarkers). A cut-off of 0.9 was applied and, as such, 9329 derived biomarkers were taken through to the next step of derived biomarker identification.

[0392] Sixteen gene expression omnibus datasets were then identified that contained patients or subjects with other conditions, or systemic inflammation due to causes other than protozoal infection (see TABLE 23). These datasets were then merged, as described for the protozoal datasets above, and an AUC calculated for each of the 9329 derived biomarkers. Only derived biomarkers that had an AUC <0.7 in this non-specific merged dataset were taken forward to the next step. As a result 523 derived biomarkers that were considered to be specific to protozoal systemic inflammation were taken forward to the next step.

[0393] A greedy search was then applied to the protozoal (including the four “discovery” datasets and five “validation” datasets—see TABLE 22) and non-protozoal datasets using all 523 derived biomarkers. The search parameters were set to maximize the difference in AUC between the protozoal and non-protozoal datasets. FIG. 14 shows the results of this greedy search in the form of a plot of AUC versus identified derived biomarkers when added sequentially. TABLE 32 shows the AUC obtained using a single derived biomarker and when using a combination of two and three derived biomarkers. A combination of three derived biomarkers resulted in an AUC of 0.99 and such a combination is considered to be the best through a balance of diagnostic performance, fewest biomarkers and least likelihood of introduction of noise. TABLE 32 identifies the three derived biomarkers and the AUC obtained in the merged datasets used in this study. Performance of these derived biomarkers across all of the datasets used is shown in the box and whisker plots of FIGS. 15 and 16. From these figures it can be clearly seen that the derived biomarkers provide good separation of patients with systemic inflammation due to a protozoal infection compared to control subjects and that these same derived biomarkers have little or no diagnostic utility in patients with systemic inflammation due to causes other than protozoal infection. Performance (AUC) of each of the derived biomarkers alone across each of the protozoal datasets is shown in TABLE 34.

[0394] Validation of these derived biomarkers was then performed on five independent datasets obtained from gene expression omnibus (GEO). These datasets represented studies in four types of protozoans, in blood and tissues other than blood, and in vitro and in vivo (see TABLE 21). Because some of these datasets used tissues other than whole blood, and the signature is designed to detect systemic inflammation using circulating leukocytes, diagnostic performance was not expected to be as strong. FIGS. 15-21 shows the performance of the final PaSIRS signature in these datasets, and other datasets, as box and whisker plots.

[0395] Some numerators and denominators occurred more often in the 523 derived biomarkers, perhaps indicating that specific pathways are involved in the immune response to protozoans, or that some biomarkers are expressed in such a manner that makes them more suitable as a numerator or denominator. TABLE 33 lists those biomarkers that appear more than once in the 523 derived biomarkers.

### Example 7

### InSIRS Host Response Biomarker Derivation

[0396] A step-wise procedure was undertaken to identify biomarkers useful in determining a host systemic immune response to non-infectious causes, which largely employs the same steps that were used to identify host systemic immune response biomarkers of viral infection, as described in Australian provisional patent application 2015903986.

[0397] In brief, InSIRS derived biomarkers were discovered that are capable of determining a specific mammalian systemic host response to non-infectious causes. This was achieved using a step-wise approach of derived biomarker discovery, subtraction and validation. Discovery of a large pool of derived biomarkers was performed using a set of datasets containing samples from subjects with no known infectious co-morbidities. Derived biomarkers in this large pool were then removed, or subtracted, if they had diagnostic performance, above a set threshold, in other datasets containing samples derived from subjects with infectious systemic inflammatory conditions, such as bacterial sepsis, viral systemic inflammation and protozoal systemic inflammation. Derived biomarkers for age, gender and race were also subtracted from the pool. Following these steps there remained a total of 164 derived biomarkers with an AUC>0.82 (see TABLE 37 for a list of these derived biomarkers and their performance). Using a greedy search on combined datasets, derived biomarkers and combinations of derived biomarkers were then identified that provided good diagnostic performance (AUC=0.935) in the non-infectious SIRS datasets (See FIG. 22 and TABLE 35). Validation of the diagnostic performance of a InSIRS signature, composed of the two derived biomarkers of ARL6IP5/ENTPD1 and HEATR1/TNFSF8, in a number of other validation datasets was then determined. Thus, the combination of four biomarkers consisting of ARL6IP5/ENTPD1 and HEATR1/TNFSF8, and other biomarkers correlated to each of these individual biomarkers, is considered to be a InSIRS diagnostic signature that provides strong diagnostic performance.

[0398] Some numerators and denominators occurred more often in the 164 derived biomarkers, perhaps indicating that specific pathways are involved in the immune response to non-infectious insult, or that some biomarkers are expressed in such a manner that makes them more suitable as a numerator or denominator. TABLE 37 lists those individual InSIRS biomarkers that appear more than once as either a numerator or denominator that are a component of the 164 derived biomarkers with a mean AUC>0.82.

### Example 8

### BaSIRS, VaSIRS, PaSIRS and InSIRS Host Response Biomarker Performance (Derived Biomarkers and Combined Derived Biomarkers)

[0399] Following normalization of each of the BaSIRS, VaSIRS, PaSIRS and InSIRS datasets and a greedy search the best performing individual host response specific derived BaSIRS, VaSIRS, PaSIRS and InSIRS biomarkers were: TSPO:HCLS1; ISG15:IL16; TTC17:G6PD; and ARL6IP5:ENTPD1, with AUCs of 0.84, 0.92, 0.96 and 0.89, respectively. The best second unique host response derived biomarkers to add to the first BaSIRS, VaSIRS, PaSIRS and InSIRS derived biomarkers were: OPLAH:ZHX2; OASL:ADGRE5; HERC6:LAP3; and HEATR1:TNFSF8, respectively. The AUCs obtained across the normalized datasets using the two host response specific derived biomarkers for BaSIRS, VaSIRS, PaSIRS and InSIRS was 0.86, 0.936, 0.99 and 0.93, a 0.2, 0.016, 0.3 and 0.36 improvement over the use of single host response specific derived biomarkers (see FIGS. 1, 6, 14 and 22). The addition of third host response specific derived biomarkers (TSPO:RNASE6, TAP1:TGFBR2, NUP160:TPP1 and ADAM19:POLR2A) only improved the AUC by 0.2, 0.009, 0.0 and 0.006 and it is possible that a third derived biomarker created overfitting and noise. However, it was considered that embodiments of optimal signatures consist essentially of the following derived biomarkers: OPLAH:ZHX2/TSPO:HCLS1 (BaSIRS); ISG15:IL16/OASL:ADGRE5 (VaSIRS); TTC17:G6PD/HERC6:LAP3/NUP160:TPP1 (PaSIRS); and ARL6IP5:ENTPD1/HEATR1:TNFSF8 (InSIRS). FIGS. 1, 6, 14 and 22 show the effect on the overall AUC of sequentially adding derived biomarkers to TSPO:HCLS1, ISG15:IL16, TTC17:G6PD and ARL6IP5:ENTPD1.

[0400] TABLES 28, 30, 32 and 35 show the performance (AUC) of some of the top host response specific derived biomarkers individually and when added sequentially to the top performing derived biomarkers for the combined datasets.

### Example 8

### BaSIRS, VaSIRS, PaSIRS and InSIRS Host Response Specific Biomarker Frequent Denominators and Numerators

[0401] The BaSIRS, VaSIRS, PaSIRS and InSIRS individual biomarkers can be grouped based on the number of times they appear as numerators or denominators in the top performing derived biomarkers.

[0402] TABLES 29, 31, 33 and 36 show the frequency of individual biomarkers that appear often in the numerator and denominator positions of the derived biomarkers for BaSIRS, VaSIRS, PaSIRS and InSIRS, respectively. For BaSIRS, PDGFC and TSPO are the most frequent numerators appearing 28 and 11 times, respectively, and INPP5D and KLRD1 are the most frequent denominators appearing 6 times each. For VaSIRS, OASL and USP18 are the most frequent numerators appearing 344 and 50 times, respectively, and ABLIM and IL16 are the most frequent denominators appearing 12 and 9 times, respectively. For PaSIRS, ARID1A and CEP192 are the most frequent numerators appearing 62 and 35 times, respectively, and SQRDL and CEBPB are the most frequent denominators appearing 45 and 40 times, respectively. For InSIRS, TNFSF8 and ADAM19 are the most frequent numerators appearing 90 and 17 times, respectively, and MACF1 and ARL6IP5 are the most frequent denominators appearing 8 and 6 times respectively.

### Example 9

### Example Applications of a Combination of BaSIRS, VaSIRS, PaSIRS and InSIRS Host Response Biomarker Profiles

[0403] Use of the BaSIRS, VaSIRS, PaSIRS and InSIRS biomarker profiles in combination in patient populations and the benefits with respect to differentiating various conditions, will now be described.

[0404] An assay capable of differentiating patients presenting with clinical signs of systemic inflammation can be used in multiple settings in both advanced and developing countries including: Intensive Care Units (medical and surgical ICU), medical wards, Emergency Departments (ED) and medical clinics. An assay capable of differentiating such patients can be used to identify those patients that (1) need to be isolated from others as part of managing spread of disease; (2) need specific treatments or management procedures; (3) do not need treatment. Such an assay can also be used as part of efforts to ensure judicious use of medical facilities and therapies including antibiotic, anti-viral and anti-protozoal medicines, detection of re-activation of latent or dormant viruses, determination of the severity of a BaSIRS, VaSIRS, PaSIRS or InSIRS, and determination of the etiology of an infection causing the presenting systemic inflammation. Such an assay can also be used to determine whether isolated microorganisms (bacterium, virus, protozoa) are more likely to be true pathogens or a contaminant/commensal/pathobiont/resident/residual microorganism.

### Detecting an Immune Response to Key Pathogens when Patients Present

[0405] There are a limited number of human pathogens that cause a bacteremia, viremia or parasitemia and of those that do, their presence in blood is often only for a short period as part of the pathogenesis, making direct detection of the pathogen difficult when using blood as a sample. Further, it takes 10-14 days following an initial infection for specific immunoglobulin G antibodies to appear in blood which can persist for some time making the determination of when a patient became infected difficult. Systemic infection with a pathogen causes a detectable systemic immune response (BaSIRS, VaSIRS, PaSIRS) prior to, and during, the development of peak clinical signs. As such, host response biomarkers are useful for early diagnosis, diagnosis and monitoring in the key periods of pathogen incubation, and when patients present with clinical signs. TABLE 1 lists common human pathogens that are known to cause SIRS and a bacteremia, viremia or parasitemia.

### Detecting a Specific Immune Response to Key Pathogens for which there are Tailored Therapies

[0406] It is important to be able to distinguish bacterial, viral and protozoan systemic infections so that appropriate therapies can be administered. Most systemic bacterial infections require immediate treatment with antibiotics and the risk to the patient of missing such a diagnosis is high. For most viruses there are no available anti-viral compounds; however, it is important that viruses, as for example shown in TABLE 2 be detected and identified because 1) they can be treated with anti-viral medication 2) most other viral infections cause transient clinical signs and are not life-threatening. Systemic protozoal infections also require immediate treatment with anti-protozoal therapies; however, in many instances such therapies are administered without a proper diagnostic work-up or even in the face of negative diagnostic test results. In many viral and protozoal infections it is also important to know if there is a co-infection with bacteria so that antibiotics can be prescribed since, in many instances, a systemic bacterial infection can be more life-threatening. The host response biomarkers described herein can determine the extent of systemic inflammation due to a bacterial, viral or protozoal infection and, as such, judgment can be made as to whether antibiotic prescription is appropriate. Further, once it has been determined that systemic inflammation is due to a bacterium, virus or protozoan, other more specific diagnostic tests can be used downstream to identify the pathogen.

### Detecting an Immune Response to Key Pathogens that Cause Respiratory Disease

[0407] It is known that the respiratory tract has its own microbiome and virome and that interactions between different bacteria (whether known pathogens, commensals or pathobionts), different viruses and host immune defenses (including innate, cellular, adaptive, physical barriers) determine whether respiratory disease is induced or not (Bosch, A. A. T. M., Biesbroek, G., Trzcinski, K., Sanders, E. A. M., & Bogaert, D. (2013). Viral and Bacterial Interactions in the Upper Respiratory Tract. PLoS Pathogens, 9(1), e1003057-12). Further, it is known that respiratory clinical signs are common in patients with malaria (Taylor, W. R. J., Hanson, J., Turner, G. D. H., White, N. J., & Dondorp, A. M. (2012). Respiratory manifestations of malaria. Chest, 142(2), 492-505). It is also known that both bacteria and viruses are commonly isolated in respiratory tract samples (e.g., Bronchial Alveolar Lavage) from both healthy and diseased subjects, and that different bacteria and viruses can potentiate the pathogenic effects of each other (McCullers, J. A. (2006). Insights into the Interaction between Influenza Virus and Pneumococcus. Clinical Microbiology Reviews, 19(3), 571-582). Therefore, isolating a known pathogen or commensal from a respiratory sample does not necessarily mean it is a causative organism and/or whether it is contributing to respiratory pathology and a host systemic inflammatory response. As such, in patients presenting to medical facilities with respiratory clinical signs in combination with systemic inflammation, it is important to determine an etiology and the extent of systemic inflammation and whether it is due to an infectious organism. The host response biomarkers described herein can determine the extent of systemic inflammation in patients with respiratory clinical signs and whether it is due to a bacterial, viral or protozoal infection. As such, judgment can be made regarding appropriate management procedures, specific anti-viral or anti-protozoal treatments and/or antibiotic treatments.

### Differentiating Patients with Bacterial and Viral Conditions in ICU

[0408] It has been shown that greater than 50% and 80% of patients in medical and surgical ICUs respectively have SIRS (Brun-Buisson C (2000) The epidemiology of the systemic inflammatory response. Intensive Care Med 26 Suppl 1: S64-S74). From a clinician's perspective these patients present with non-specific clinical signs and the source and type of infection, if there is one, must be determined quickly so that appropriate therapies can be administered. Patients with InSIRS have a higher likelihood of being infected with bacteria (compared to patients without SIRS), and have a much higher 28-day mortality (Comstedt P, Storgaard M, Lassen A T (2009) The Systemic Inflammatory Response Syndrome (SIRS) in acutely hospitalised medical patients: a cohort study. Scand J Trauma Resusc Emerg Med 17: 67. doi:10.1186/1757-7241-17-67). Further, patients with prolonged sepsis (BaSIRS) have a higher frequency of viral infections, possibly due to reactivation of latent viruses as a result of immunosuppression (Walton, A. H., Muenzer, J. T., Rasche, D., Boomer, J. S., & Sato, B. (2014). Reactivation of multiple viruses in patients with sepsis. PLoS ONE). The higher the prevalence of SIRS in ICU, the higher the risk of infection and death will be in SIRS-affected patients. The re-activation of viruses in ICU patients with BaSIRS, and the benefits of early intervention in patients with BaSIRS (Rivers E P (2010) Point: Adherence to Early Goal-Directed Therapy: Does It Really Matter? Yes. After a Decade, the Scientific Proof Speaks for Itself. Chest 138: 476-480) creates a need for triaging patients with clinical signs of SIRS to determine whether they have a viral or bacterial infection, or both. Monitoring intensive care patients on a regular basis with biomarkers of the present invention will allow medical practitioners to determine the presence, or absence, of a bacterial or viral infection. If positive, further diagnostic tests could then be performed on appropriate clinical samples to determine the type of infection so that appropriate therapy can be administered. For example, if a patient tested positive for a viral infection, and further testing demonstrated the presence of a herpes virus, then appropriate anti-herpes viral therapies could be administered.

[0409] In pediatric ICUs the incidence of viral infections is reportedly low (1%), consisting mostly of enterovirus, parechovirus and respiratory syncytial virus infections (Verboon-Maciolek, M. A., Krediet, T. G., Gerards, L. J., Fleer, A., & van Loon, T. M. (2005). Clinical and epidemiologic characteristics of viral infections in a neonatal intensive care unit during a 12-year period. The Pediatric Infectious Disease Journal, 24(10), 901-904). However, because viral infections often predispose infants to bacterial infections, and the mortality rate of virus-infected patients is high, and such patients present with similar clinical signs, it is important to either rule in or rule out the possibility of a bacterial or viral infection so that other appropriate therapies can be administered, and appropriate downstream diagnostic tests and management procedures can be performed.

[0410] Determining which patients have which type of infection in the ICU will allow for early intervention, appropriate choice of therapies, when to start and stop therapies, whether a patient needs to be isolated, when to start and stop appropriate patient management procedures, and in determining how a patient is responding to therapy. Information provided by the BaSIRS, VaSIRS, PaSIRS and InSIRS biomarkers of the present invention will therefore allow medical intensivists to tailor and modify therapies and management procedures to ensure infected patients survive and spend less time in intensive care. Less time in intensive care leads to considerable savings in medical expenses including through less occupancy time and through appropriate use and timing of medications.

### Differentiating Patients with Systemic Inflammation Due to an Infection in Hospital Wards

[0411] In a study in a U.S. hospital of over 4000 inpatients over an 11-week period at least one episode of fever occurred in 1,194 patients (29%) (McGowan J E J, Rose R C, Jacobs N F, Schaberg D R, Haley R W (1987) Fever in hospitalized patients. With special reference to the medical service. Am J Med 82: 580-586). The rate of fever was highest on medical and surgical services and the authors found that both infectious and non-infectious processes played important roles in the cause. However, determining the cause of fever was complicated by the fact that over 390 different factors were identified. In this study, a review of 341 episodes of fever in 302 patients on the medical service identified a single potential cause in 56%, multiple factors were present in 26%, and no potential causes were found in 18%. Of all factors identified, 44% were community-acquired infections, 9% were nosocomial infections, 20% possibly involved infection, and 26% were non-infectious processes. Thus, fever is common in hospital surgical and medical wards, there are many causes including infectious and non-infectious, diagnosis is difficult and in many instances a cause is not found. The biomarkers outlined herein can differentiate bacterial, viral and protozoal infections from other causes of SIRS which will assist medical practitioners in determining the cause of fever, ensuring that resources are not wasted on unnecessary diagnostic procedures and that patients are managed and treated appropriately.

[0412] The estimated number of hospital acquired infections (HAI) in the USA in 2002 was 1.7 million of which approximately 100,000 caused patient death (Klevens et al., Estimating Health Care-Associated Infections and Deaths in U.S. Hospitals. Public Health Reports, March-April 2007 Vol 122, p 160-166, 2002). Common sites and microorganism for HAIs include the respiratory and urinary tracts, and canulas with Staphylococcus and E. coli (Spelman, D. W. (2002). 2: Hospital-acquired infections. The Medical Journal of Australia, 176(6), 286-291). Viruses are also an important cause of HAI where it has been reported that between 5 and 32% of all nosocomial infections are due to viruses, depending upon the hospital location and patient type (Aitken, C., & Jeffries, D. J. (2001). Nosocomial spread of viral disease. Clinical Microbiology Reviews, 14(3), 528-546); Valenti, W. M., Menegus, M. A., Hall, C. B., Pincus, P. H., & Douglas, R. G. J. (1980). Nosocomial viral infections: I. Epidemiology and significance. Infection Control: IC, 1(1), 33-37). Identification of those patients in wards with a BaSIRS or VaSIRS, especially early in the course of infection when there are non-specific clinical signs, would assist clinicians and hospital staff in determining appropriate measures (e.g quarantine, hygiene methods) to be put in place to reduce the risk of spread of infection to other non-infected patients.

### Differentiating Patients with an Infection in Emergency Departments

[0413] In 2010, approximately 130 million people presented to emergency departments in the USA and the third most common primary reason for the visit was fever (5.6 million people had a fever (>38° C.) and for 5 million people it was the primary reason for the visit) (Niska R, Bhuiya F, Xu J (2010) National hospital ambulatory medical care survey: 2007 emergency department summary. Natl Health Stat Report 26: 1-31). Of those patients with a fever, 664,000 had a fever of unknown origin—that is, the cause of the fever was not obvious at presentation. As part of diagnosing the reason for the emergency department visit 48,614,000 complete blood counts (CBC) were performed and 5.3 million blood cultures were taken. In 3.65 million patients presenting the primary diagnosis was “infectious” and in approximately 25% of cases (32.4 million) antibiotics were administered. 13.5% of all people presenting to emergency were admitted to hospital. Clinicians in emergency need to determine the answer to a number of questions quickly, including: what is the reason for the visit, is the reason for the visit an infection, does the patient need to be admitted? The diagnosis, treatment and management of patients with a fever, InSIRS, VaSIRS or BaSIRS are different. By way of example, a patient with a fever without other SIRS clinical signs and no obvious source of viral, or bacterial infection may be sent home, or provided with other non-hospital services, without further hospital treatment. However, a patient with a fever may have early BaSIRS, and not admitting such a patient and aggressively treating with antibiotics may put their life at risk. Such a patient may also have VaSIRS and quickly deteriorate, or progress to BaSIRS without appropriate hospital care and/or the use of anti-viral agents. The difference in the number of patients presenting to emergency that are ultimately diagnosed with an “infection” (3.65 million) and the number treated with antibiotics (32.4 million) suggests the following; 1) diagnostic tools that determine the presence of an infection are not available, or are not being used, or are not accurate enough, or do not provide strong enough negative predictive value, or are not providing accurate information that can be acted on within a reasonable timeframe 2) when it comes to suspected infection, and because of the acute nature of infections, clinicians err on the side of caution by administering antibiotics. Further, in a study performed in the Netherlands on patients presenting to emergency with fever, 36.6% of patients admitted to hospital had a suspected bacterial infection (that is, it was not confirmed) (Limper M, Eeftinck Schattenkerk D, de Kruif M D, van Wissen M, Brandjes D P M, et al. (2011) One-year epidemiology of fever at the Emergency Department. Neth J Med 69: 124-128). This suggests that a large proportion of patients presenting to emergency are admitted to hospital without a diagnosis. The BaSIRS and VaSIRS biomarkers described herein can identify those patients with a BaSIRS or VaSIRS from those without a BaSIRS or VaSIRS, assisting medical practitioners in the USA in triaging patients with fever or SIRS. Such effective triage tools make best use of scarce hospital resources, including staff, equipment and therapies. Accurate triage decision-making also ensures that patients requiring hospital treatment are given it, and those that don't are provided with other appropriate services.

[0414] In a study performed in Argentina in patients presenting to emergency with influenza-like symptoms, only 37% of samples taken and analyzed for the presence of viruses (using immunofluorescence, RT-PCR and virus culture) were positive (Santamaria, C., Uruena, A., Videla, C., Suarez, A., Ganduglia, C., Carballal, G., et al. (2008). Epidemiological study of influenza virus infections in young adult outpatients from Buenos Aires, Argentina. Influenza and Other Respiratory Viruses, 2(4), 131-134). In a study based in Boston, USA, acute respiratory infections were a common reason children presented to emergency departments in Winter (Bourgeois, F. T., Valim, C., Wei, J. C., McAdam, A. J., & Mandl, K. D. (2006). Influenza and other respiratory virus-related emergency department visits among young children. Pediatrics, 118(1), e1-8). Using a respiratory classifier (based on clinical signs) these authors found that in children less than, or equal to, 7 years of age an acute respiratory infection was suspected in 39.8% of all emergency department visits (less at a whole city or state level). In this latter study only 55.5% of these patients had a virus isolated. Thus, a large percentage of patients with influenza-like symptoms presenting to emergency are likely not being diagnosed as having a viral infection using laboratory-based tests. The VaSIRS biomarkers outlined herein can identify those patients with a VaSIRS from those without a VaSIRS, assisting medical practitioners in making an accurate diagnosis of a viral infection in patients with influenza-like symptoms. Such patients can then be further tested to determine the presence of specific viruses amenable to anti-viral therapies. Accurate diagnosis of a VaSIRS also assists in ensuring that only those patients that need either anti-viral treatment or antibiotics receive them which may lead to fewer side effects and fewer days on antibiotics (Adcock, P. M., Stout, G. G., Hauck, M. A., & Marshall, G. S. (1997). Effect of rapid viral diagnosis on the management of children hospitalized with lower respiratory tract infection. The Pediatric Infectious Disease Journal, 16(9), 842-846).

[0415] In a study of febrile pediatric patients presenting to an emergency department in Tanzania, 56.7% had a positive urine test, 19.2% were HIV positive and 8.7% were positive for malaria. Clinical diagnoses included; malaria (24.3%), pneumonia (15.2%), sepsis (9.5%), urinary tract infection (7.6%) and sickle cell anemia (2.9%). A wide range of infections were diagnosed (Ringo, F H., et al., (2013). Clinical presentation, diagnostic evaluation, treatment and diagnoses of febrile children presenting to the emergency department at Muhimbili national hospital in Dar es Salaam, Tanzania. African Journal of Emergency Medicine, 3(4), S21-S22). In this population with systemic inflammation it would therefore be important to distinguish between bacterial, viral and protozoal infection to ensure appropriate treatment and management procedures were rapidly implemented. The biomarkers described in the present specification would assist clinicians in determining whether the cause of the presenting clinical signs of systemic inflammation were due to a bacterial, viral or protozoal infection.

### Differentiating Patients with a Systemic Inflammatory Response to Infection in Medical Clinics

[0416] Patients presenting to medical clinics as outpatients often have clinical signs of SIRS including abnormal temperature, heart rate or respiratory rate and there are many causes of these clinical signs. Such patients need to be assessed thoroughly to determine the cause of the clinical signs because in some instances it could be a medical emergency. By way of example, a patient with colic might present with clinical signs of increased heart rate. Differential diagnoses could be (but not limited to) appendicitis, urolithiasis, cholecystitis, pancreatitis, enterocolitis. In each of these conditions it would be important to determine if there was a non-infectious systemic inflammatory response (InSIRS) or whether an infection was contributing to the systemic response. The treatment and management of patients with non-infectious systemic inflammation and/or SIRS due to infectious causes are different. The BaSIRS, VaSIRS, PaSIRS and InSIRS biomarkers detailed herein can differentiate infectious causes of SIRS from other causes of SIRS so that a medical practitioner can either rule in or rule out a systemic inflammation of bacterial, viral or protozoal etiology. As a result medical practitioners can more easily determine the next medical actions and procedure(s) to perform to satisfactorily resolve the patient issue.

### Detection of Reactivation of Latent Viruses

[0417] Reactivation of latent viruses is common in patients that are immunocompromised, including those with prolonged sepsis and those on immunosuppressive therapy (Walton A H, Muenzer J T, Rasche D, Boomer J S, Sato B, et al. (2014) Reactivation of multiple viruses in patients with sepsis. PLoS ONE 9: e98819; Andersen, H. K., and E. S. Spencer. 1969. Cytomegalovirus infection among renal allograft recipients. Acta Med. Scand. 186:7-19; Bustamante C I, Wade J C (1991) Herpes simplex virus infection in the immunocompromised cancer patient. J Clin Oncol 9: 1903-1915). For patients with sepsis (Walton et al., 2014), cytomegalovirus (CMV), Epstein-Barr (EBV), herpes-simplex (HSV), human herpes virus-6 (HHV-6), and anellovirus TTV were all detectable in blood at higher rates compared to control patients, and those patients with detectable CMV had higher 90-day mortality. However, because these viruses have only been detected in sepsis patients it is not known whether reactivated latent viruses contribute to pathology, morbidity and mortality. The BaSIRS, VaSIRS, PaSIRS and InSIRS biomarkers detailed herein can differentiate infectious causes of SIRS, and the VaSIRS biomarkers can also detect systemic inflammation due to reactivation of latent herpes viruses. Patients with reactivated herpes virus infection could then be put on appropriate anti-viral therapies.

### Determining the Extent of Systemic Inflammation in Patients

[0418] Patients presenting to medical facilities often have any one of the four clinical signs of SIRS. However, many different conditions can present with one of the four clinical signs of SIRS and such patients need to be assessed to determine if they have InSIRS, and if so the extent of InSIRS, or BaSIRS, and if so the extent of BaSIRS, or VaSIRS, and if so the extent of VaSIRS, or PaSIRS, and if so the extent of PaSIRS, and to exclude other differential diagnoses.

[0419] By way of example, a patient with respiratory distress is likely to present with clinical signs of increased respiratory rate. Differential diagnoses could be (but not limited to) asthma, viral or bacterial pneumonia, respiratory distress due to malaria, congestive heart failure, physical blockage of airways, allergic reaction, collapsed lung, pneumothorax. In this instance it would be important to determine if there was a infection-negative systemic inflammatory response (InSIRS) or whether an infection (viral, bacterial, or protozoal) was contributing to the condition. The treatment and management of patients with and without systemic inflammation and/or viral, bacterial, protozoal infections are different. Because the biomarkers described herein can determine the degree of systemic involvement, the use of them will allow medical practitioners to determine the next medical procedure(s) to perform to satisfactorily resolve the patient issue. Patients with a collapsed lung, pneumothorax or a physical blockage are unlikely to have a systemic inflammatory response and patients with congestive heart failure, allergic reaction or asthma may have a large systemic inflammatory response but not due to infection. The extent of BaSIRS, VaSIRS, PaSIRS or InSIRS, as indicated by biomarkers presented herein, allows clinicians to determine a cause of the respiratory distress, to rule out other possible causes and provides them with information to assist in decision making on next treatment and management steps. For example, a patient with respiratory distress and a strong marker response indicating VaSIRS is likely to be hospitalized and specific viral diagnostic tests performed to ensure that appropriate anti-viral therapy is administered.

### Antibiotic Stewardship

[0420] In patients suspected of having a systemic infection (InSIRS, BaSIRS, VaSIRS, PaSIRS) a clinical diagnosis and treatment regimen is provided by the physician(s) at the time the patient presents and often in the absence of any results from diagnostic tests. This is done in the interests of rapid treatment and positive patient outcomes. However, such an approach leads to over-prescribing of antibiotics irrespective of whether the patient has a bacterial infection or not. Clinician diagnosis of BaSIRS is reasonably reliable (0.88) in children but only with respect to differentiating between patients ultimately shown to be blood culture positive and those that were judged to be unlikely to have an infection at the time antibiotics were administered (Fischer, J. E. et al. Quantifying uncertainty: physicians' estimates of infection in critically ill neonates and children. Clin. Infect. Dis. 38, 1383-1390 (2004)). In Fischer et al., (2004), 54% of critically ill children were put on antibiotics during their hospital stay, of which only 14% and 16% had proven systemic bacterial infection or localized infection respectively. In this study, 53% of antibiotic treatment courses for critically ill children were for those that had an unlikely infection and 38% were antibiotic treatment courses for critically ill children as a rule-out treatment episode. Clearly, pediatric physicians err on the side of caution with respect to treating critically ill patients by placing all patients suspected of an infection on antibiotics—38% of all antibiotics used in critically ill children are used on the basis of ruling out BaSIRS, that is, are used as a precaution. Antibiotics are also widely prescribed and overused in adult patients as reported in Braykov et al., 2014 (Braykov, N. P., Morgan, D. J., Schweizer, M. L., Uslan, D. Z., Kelesidis, T., Weisenberg, S. A., et al. (2014). Assessment of empirical antibiotic therapy optimisation in six hospitals: an observational cohort study. The Lancet Infectious Diseases, 14(12), 1220-1227). In this study, across six US hospitals over four days in 2009 and 2010, 60% of all patients admitted received antibiotics. Of those patients prescribed antibiotics 30% were afebrile and had a normal white blood cell count and where therefore prescribed antibiotics as a precaution. Further, in study of febrile children presenting to an African emergency department 70% were put on antibiotics despite approximately only 35% being diagnosed as having a bacterial infection (Ringo, F H., et al., (2013). Clinical presentation, diagnostic evaluation, treatment and diagnoses of febrile children presenting to the emergency department at Muhimbili national hospital in Dar es Salaam, Tanzania. African Journal of Emergency Medicine, 3(4), S21-S22). As such, an assay that can accurately diagnose BaSIRS, VaSIRS, PaSIRS or InSIRS in patients presenting with non-pathognomonic clinical signs of infection would be clinically useful and may lead to more appropriate use of antibiotics, anti-viral and anti-malarial therapies.

### Controlling the Spread of Infectious Agents

[0421] Often the best method of limiting infectious disease spread is through a combination of accurate diagnosis, surveillance, patient isolation and practical measures to prevent transmission (e.g., hand washing) (Sydnor, E. R. M., & Perl, T. M. (2011). Hospital Epidemiology and Infection Control in Acute-Care Settings. Clinical Microbiology Reviews, 24(1), 141-173; Chowell, G., Castillo-Chavez, C., Fenimore, P. W., Kribs-Zaleta, C. M., Arriola, L., & Hyman, J. M. (2004). Model parameters and outbreak control for SARS. Emerging Infectious Diseases, 10(7), 1258-1263.; Centers for Disease Control, Interim U.S. Guidance for Monitoring and Movement of Persons with Potential Ebola Virus Exposure, Dec. 24, 2014; Fletcher, S. M., Stark, D., Harkness, J., & Ellis, J. (2012). Enteric Protozoa in the Developed World: a Public Health Perspective. Clinical Microbiology Reviews, 25(3), 420-449). The BaSIRS, VaSIRS, PaSIRS and InSIRS biomarkers detailed herein can be used to identify those people with early clinical signs that actually have a BaSIRS, VaSIRS, PaSIRS or InSIRS. For those people identified as having a BaSIRS, VaSIRS, PaSIRS or InSIRS appropriate testing and procedures can then be performed to obtain an accurate and specific diagnosis and to limit infectious agent spread, if diagnosed, through isolation of patients and the use of appropriate protective measures.

### Example 10

### Example Applications of a Combination of Host Response Biomarker Profiles and/or Pathogen Specific Biomarkers

[0422] Combining host response biomarker profiles and pathogen specific biomarkers provides extra diagnostic power that is useful in a number of medical facility locations (e.g., clinics, emergency, ward, ICU) and infectious disease diagnostic situations. For the diagnosis of BaSIRS, typically blood and other body fluid samples are taken for culture. In comparison to a physician's retrospective diagnosis these culture results are often falsely positive or falsely negative. Possible causes of such false positive or negative results include: growth of a contaminant or commensal organism, overgrowth of a dominant non-pathogenic organism, organism not viable, organism will not grow in media, organism not present in the sample, not enough sample taken, antibiotics in the sample inhibit growth. TABLE 39 indicates possible interpretation of either positive or negative results using a combination of BaSIRS and BIP biomarkers.

[0423] For the diagnosis of VaSIRS, typically blood and other body fluid samples are taken for protein-based or molecular DNA testing (as either individual tests or a panel of tests). In comparison to a physician's retrospective diagnosis these test results are also often falsely positive or falsely negative. Possible causes of such false positive or negative results include; presence of a virus that is not contributing to pathology (latency, commensal), virus not present in the sample, not enough sample taken, assay not sensitive enough, wrong assay performed, specific antibodies have not yet been produced, residual antibodies from a previous non-relevant infection. TABLE 40 indicates possible interpretation of either positive or negative results using a combination of VaSIRS and VIP biomarkers.

[0424] For the diagnosis of PaSIRS, typically blood and other body fluid samples are taken for antibody or antigen testing (as either individual tests or a panel of tests). In comparison to a physician's retrospective diagnosis these test results are also often falsely positive or falsely negative. Possible causes of such false positive or negative results include; presence of a protozoan that is not contributing to pathology, protozoan not present in the sample, not enough sample taken, assay not sensitive enough, wrong assay performed, antibodies not yet produced, residual antibodies from a previous non-relevant infection. TABLE 41 indicates possible interpretation of either positive or negative results using a combination of PaSIRS and PIP biomarkers.

[0425] In some instances it would be useful to use BaSIRS and VaSIRS host response specific biomarkers in combination with bacterial and viral pathogen specific biomarkers. For example, children often present to first world emergency departments with fever. Interpretation of results would be along the same lines as described in the tables above. However, double positive results (for either bacterial or viral) would provide greater assurance to the clinician that a child had either a bacterial or viral infection. If all assays were positive then a mixed infection would be likely. If all assays were negative then it is likely the child has InSIRS. A positive BaSIRS host response in combination with a positive bacterial pathogen test would be the most life threatening and require immediate medical attention, administration of appropriate therapies (antibiotics) and appropriate interventions. A negative BaSIRS host response in combination with a negative bacterial pathogen test would provide clinicians with assurance that the cause of the fever was not bacterial. FIGS. 34 and 35 show the use of a combination of BaSIRS and bacterial pathogen detection, and VaSIRS and viral pathogen detection respectively when using in-house clinical samples (Venus A study and MARS study). TABLES 38 and 39 demonstrate how the results of the use of such combinations may be interpreted.

[0426] In some instances it would be useful to use BaSIRS, VaSIRS, PaSIRS and InSIRS host response biomarkers in combination with bacterial, viral and protozoal pathogen specific biomarkers. For example, children often present to third world emergency departments with fever. Interpretation of results would be along the same lines as described in the tables above. However, double positive results (for either bacterial or viral or protozoal) would provide greater assurance to the clinician that a child had either a bacterial or viral or protozoal infection. If two or more assays were positive then a mixed infection would be likely. If BaSIRS, VaSIRS and PaSIRS assays and pathogen assays were negative then it is likely the child has InSIRS. A positive BaSIRS host response in combination with a positive bacterial pathogen test would be the most life threatening and require immediate medical attention, administration of appropriate therapies (antibiotics) and appropriate interventions. A negative BaSIRS host response in combination with a positive InSIRS host response and a negative bacterial pathogen test would provide clinicians with assurance that the cause of the fever was not bacterial.

[0427] In some instances it would be useful to use just host response biomarkers (BaSIRS, VaSIRS, PaSIRS, InSIRS, alone or in combination), especially in instances where it is known that growth and isolation of a causative organism has a low positive rate (e.g. blood culture in patients in a setting with a low prevalence of sepsis).

[0428] Examples of the use of multiple host response biomarkers are depicted in FIGS. 26, 36 and 37. FIG. 26 shows a multi-dimensional scaling plot using random forest and BaSIRS and VaSIRS derived biomarkers on data associated with GSE63990. In this dataset patients with acute respiratory inflammation were retrospectively categorized by a clinician into the cohorts of: bacterial, viral or non-infectious. Separation of such patients into these three cohorts using BaSIRS and VaSIRS derived biomarkers can be seen clearly. FIG. 36 shows the use of the BaSIRS and VaSIRS signature in a pediatric population with retrospectively diagnosed sepsis, InSIRS, viral infection and mixed infection. Some patients show host responses to both bacteria and viruses suggesting that co-infections can occur and/or one type of infection may predispose to another type of infection. FIG. 37 demonstrates the specificity of the BaSIRS, VaSIRS, PaSIRS and InSIRS signatures in a number of GEO datasets covering a variety of conditions including sepsis, malaria, SIRS and influenza, and in healthy subjects.

### Example 11

### First Example Workflow for Determining Host Response

[0429] A first example workflow for measuring host response to BaSIRS, VaSIRS, PaSIRS and InSIRS will now be described. The workflow involves a number of steps depending upon availability of automated platforms. The assay uses quantitative, real-time determination of the amount of each host immune cell RNA transcript in the sample based on the detection of fluorescence on a qRT-PCR instrument (e.g., Applied Biosystems 7500 Fast Dx Real-Time PCR Instrument, Applied Biosystems, Foster City, Calif., catalogue number 440685; K082562). Transcripts are each reverse-transcribed, amplified, detected, and quantified in a separate reaction well for each target gene using a probe that is visualized in the FAM channel (by example). Such reactions can be run as single-plexes (one probe for one transcript per tube), multiplexed (multiple probes for multiple transcripts in one tube), one-step (reverse transcription and PCR are performed in the same tube), or two-step (reverse transcription and PCR performed as two separate reactions in two tubes). A score is calculated for each set of BaSIRS, VaSIRS, PaSIRS and InSIRS host response biomarkers using interpretive software provided separately to the kit but designed to integrate with RT-PCR machines. It is contemplated that a separate score is calculated that combines the results of BaSIRS, VaSIRS, PaSIRS and InSIRS host response specific biomarkers using interpretive software provided separately to the kit but designed to integrate with RT-PCR machines. Such a combined score aims to provide clinicians with information regarding the type(s) and degree(s) of systemic inflammation for each of BaSIRS, VaSIRS, PaSIRS and InSIRS.

[0430] The workflow below describes the use of manual processing and a pre-prepared kit.

[0431] Pre-Analytical

[0432] Blood collection

[0433] Total RNA isolation

[0434] Analytical

[0435] Reverse transcription (generation of cDNA)

[0436] qPCR preparation

[0437] qPCR

[0438] Software, Interpretation of Results and Quality Control

[0439] Output.

[0440] Kit Contents

[0441] Diluent

[0442] RT Buffer

[0443] RT Enzyme Mix

[0444] qPCR Buffer

[0445] Primer/Probe Mixes

[0446] AmpliTaq Gold® (or similar)

[0447] High Positive Control (one for each of BaSIRS, VaSIRS, PaSIRS and InSIRS)

[0448] Low Positive Control (one for each of BaSIRS, VaSIRS, PaSIRS and InSIRS)

[0449] Negative Control

[0450] Blood Collection

[0451] The specimen used is a 2.5 mL sample of blood collected by venipuncture using the PAXgene® collection tubes within the PAXgene® Blood RNA System (Qiagen, kit catalogue #762164; Becton Dickinson, Collection Tubes catalogue number 762165; K042613). An alternate collection tube is Tempus® (Life Technologies).

[0452] Total RNA Isolation

[0453] Blood (2.5 mL) collected into a PAXgene RNA tube is processed according to the manufacturer's instructions. Briefly, 2.5 mL sample of blood collected by venipuncture using the PAXgene™ collection tubes within the PAXgene™ Blood RNA System (Qiagen, kit catalogue #762164; Becton Dickinson, Collection Tubes catalogue number 762165; K042613). Total RNA isolation is performed using the procedures specified in the PAXgene™ Blood RNA kit (a component of the PAXgene™ Blood RNA System). The extracted RNA is then tested for purity and yield (for example by running an A_{260/280} ratio using a Nanodrop® (Thermo Scientific)) for which a minimum quality must be (ratio >1.6). RNA should be adjusted in concentration to allow for a constant input volume to the reverse transcription reaction (below). RNA should be processed immediately or stored in single-use volumes at or below −70° C. for later processing.

[0454] Reverse Transcription

[0455] Determine the appropriate number of reaction equivalents to be prepared (master mix formulation) based on a plate map and the information provided directly below. Each clinical specimen is run in singleton.

[0456] Each batch run desirably includes the following specimens:
[0457] High Control (one for each of BaSIRS, VaSIRS, PaSIRS and InSIRS), Low Control (one for each of BaSIRS, VaSIRS, PaSIRS and InSIRS), Negative Control, and No Template Control (Test Diluent instead of sample) in singleton each

[0458] Program the ABI 7500 Fast Dx Instrument as detailed below.
[0459] Launch the software.
[0460] Click Create New Document
[0461] In the New Document Wizard, select the following options:
   [0462] i. Assay: Standard Curve (Absolute Quantitation)
   [0463] i. Container: 96-Well Clear
   [0464] iii. Template: Blank Document (or select a laboratory-defined template)
   [0465] iv. Run Mode: Standard 7500
   [0466] v. Operator: Enter operator's initials
   [0467] vi. Plate name: [default]
[0468] Click Finish
[0469] Select the Instrument tab in the upper left
[0470] In the Thermal Cycler Protocol area, Thermal Profile tab, enter the following times:
   [0471] i. 25° C. for 10 minutes
   [0472] ii. 45° C. for 45 minutes
   [0473] iii. 93° C. for 10 minutes
   [0474] iv. Hold at 25° C. for 60 minutes

[0475] In a template-free area, remove the test Diluent and RT-qPCR Test RT Buffer to room temperature to thaw. Leave the RT-qPCR Test RT Enzyme mix in the freezer and/or on a cold block.

[0476] In a template-free area, assemble the master mix in the order listed below.

### RT Master Mix—Calculation

| | Per well | ×N |
|---|---|---|
| RT-qPCR Test RT Buffer | 3.5 μL | 3.5 × N |
| RT-qPCR Test RT Enzyme mix | 1.5 μL | 1.5 × N |
| Total Volume | 5 μL | 5 × N |

[0478] Gently vortex the master mix then pulse spin. Add the appropriate volume (5 μL) of the RT Master Mix into each well at room temperature.

[0479] Remove clinical specimens and control RNAs to thaw. (If the specimens routinely take longer to thaw, this step may be moved upstream in the validated method.)

[0480] Vortex the clinical specimens and control RNAs, then pulse spin. Add 10 μL of control RNA or RT-qPCR Test Diluent to each respective control or negative well.

[0481] Add 10 μL of sample RNA to each respective sample well (150 ng total input for RT; OD₂₆₀/OD₂₈₀ ratio greater than 1.6). Add 10 μL of RT-qPCR Test Diluent to the respective NTC well.

[0482] Note: The final reaction volume per well is 15 μL.

| | Samples |
|---|---|
| RT Master Mix | 5 μL |
| RNA sample | 10 μL |
| Total Volume (per well) | 15 μL |

[0483] Mix by gentle pipetting. Avoid forming bubbles in the wells.

[0484] Cover wells with a seal.

[0485] Spin the plate to remove any bubbles (1 minute at 400×g).

[0486] Rapidly transfer to ABI 7500 Fast Dx Instrument pre-programmed as detailed above.

[0487] Click Start. Click Save and Continue. Before leaving the instrument, it is recommended to verify that the run started successfully by displaying a time under Estimated Time Remaining.

[0488] qPCR master mix may be prepared to coincide roughly with the end of the RT reaction. For example, start about 15 minutes before this time. See below.

[0489] When RT is complete (i.e. resting at 25° C.; stop the hold at any time before 60 minutes is complete), spin the plate to collect condensation (1 minute at 400×g).

[0490] qPCR Preparation

[0491] Determine the appropriate number of reaction equivalents to be prepared (master mix formulation) based on a plate map and the information provided in RT Preparation above.

[0492] Program the ABI 7500 Fast Dx with the settings below.
[0493] a) Launch the software.
[0494] b) Click Create New Document
[0495] c) In the New Document Wizard, select the following options:
   [0496] i. Assay: Standard Curve (Absolute Quantitation)
   [0497] ii. Container: 96-Well Clear
   [0498] iii. Template: Blank Document (or select a laboratory-defined template)
   [0499] iv. Run Mode: Standard 7500
   [0500] v. Operator: Enter operator's initials
   [0501] vi. Plate name: Enter desired file name
[0502] d) Click Next
[0503] e) In the Select Detectors dialog box:
   [0504] i. Select the detector for the first biomarker, and then click Add>>.
   [0505] ii. Select the detector second biomarker, and then click Add>>, etc.
   [0506] iii. Passive Reference: ROX
[0507] f) Click Next
[0508] g) Assign detectors to appropriate wells according to plate map.
   [0509] i. Highlight wells in which the first biomarker assay will be assigned
   [0510] ii. Click use for the first biomarker detector
   [0511] iii. Repeat the previous two steps for the other biomarkers
   [0512] iv. Click Finish
[0513] h) Ensure that the Setup and Plate tabs are selected
[0514] i) Select the Instrument tab in the upper left
[0515] j) In the Thermal Cycler Protocol area, Thermal Profile tab, perform the following actions:
   [0516] i. Delete Stage 1 (unless this was completed in a laboratory-defined template).
   [0517] ii. Enter sample volume of 25 μL.
   [0518] iii. 95° C. 10 minutes
   [0519] iv. 40 cycles of 95° C. for 15 seconds, 63° C. for 1 minute
   [0520] v. Run Mode: Standard 7500
   [0521] vi. Collect data using the “stage 2, step 2 (63.0@1:00)” setting
[0522] k) Label the wells as below using this process: Right click over the plate map, then select Well Inspector. With the Well Inspector open, select a well or wells. Click back into the Well Inspector and enter the Sample Name. Close the Well Inspector when completed.
   [0523] i. CONN for High Control
   [0524] ii. CONL for Low Control
   [0525] iii. CONN for Negative Control
   [0526] iv. NTC for No Template Control
   [0527] v. [Accession ID] for clinical specimens
[0528] l) Ensure that detectors and quenchers are selected as listed below (for singleplex reactions—one target per reaction).
   [0529] i. FAM for CEACAM4 biomarker 1; quencher=none
   [0530] ii. FAM for LAMP1 biomarker 2; quencher=none
   [0531] iii. FAM for PLAC8 biomarker 3; quencher=none
   [0532] iv. FAM for PLA2G7 biomarker 4; quencher=none
   [0533] v. FAM for ISG15 biomarker 1; quencher=none
   [0534] vi. FAM for IL16 biomarker 2; quencher=none
   [0535] vii. FAM for OASL; biomarker 3; quencher=none
   [0536] viii. FAM for ADGRE5; biomarker 4; quencher=none
   [0537] ix. FAM for TTC17 biomarker 1; quencher=none
   [0538] x. FAM for G6PD biomarker 2; quencher=none
   [0539] xi. FAM for HERC6 biomarker 3; quencher=none
   [0540] xii. FAM for LAP3 biomarker 4; quencher=none
   [0541] xiii. FAM for NUP160 biomarker 5; quencher=none
   [0542] xiv. FAM for TPP1 biomarker 6; quencher=none
   [0543] xv. FAM for ARL6IP5 biomarker 1; quencher=none
   [0544] xvi. FAM for ENTPD1 biomarker 2; quencher=none
   [0545] xvii. FAM for HEATR1 biomarker 3; quencher=none
   [0546] xviii. FAM for TNFSF8 biomarker 4; quencher=none
   [0547] xix. Select “ROX” for passive reference

[0548] qPCR

[0549] In a template-free area, remove the assay qPCR Buffer and assay Primer/Probe Mixes for each target to room temperature to thaw. Leave the assay AmpliTaq Gold in the freezer and/or on a cold block.

[0550] Still in a template-free area, prepare qPCR Master Mixes for each target in the listed order at room temperature.

qPCR Master Mixes - Calculation Per Sample

| | Per well | ×N |
|---|---|---|
| qPCR Buffer | 11 μL | 11 × N |
| Primer/Probe Mix | 3.4 μL | 3.4 × N |
| AmpliTaq Gold ® | 0.6 μL | 0.6 × N |
| Total Volume | 15 μL | 15 × N |

[0551] Example forward (F) and reverse (R) primers and probes (P) (in 5′-3′ orientation) and their final reaction concentration for measuring 14 host response transcripts to bacterial, viral and protozoal host response specific biomarkers are contained in TABLE H (F, forward; R, reverse; P, probe). The melting temperature for all primers and probes in this table is approximately 60° C. Primers are designed for best coverage of all transcripts and across an exon/intron border to reduce the likelihood of amplifying genomic DNA.

TABLE H

| Reagent | 5′-3′ Sequence | Reactionr mM | SEQ ID NO |
|---|---|---|---|
| OPLAH-F | GCTGGACATCAACACCGTGGC | 360 | 1666 |
| OPLAH-R | GTCCTGGGTGGGCTCCTGC | 360 | 1667 |
| OPLAH-P | GGGGTTCCCGCCTCTTCTTCAG | 50 | 1668 |
| ZHX2-F | GCGGCAGAAGGTGTGTCGGAA | 360 | 1669 |
| ZHX2-R | GTCCCGTTGATCAGCACAGCAG | 360 | 1670 |
| ZHX2-P | GCAGAGGCTGGCCAGGC | 50 | 1671 |
| TSPO-F | CTGAACTGGGCATGGCCCCC | 360 | 1672 |
| TSPO-R | CCCCACTGACCAGCAGGAGATC | 360 | 1673 |
| TSPO-P | GGTGCCCGACAAATGGGCTG | 50 | 1674 |
| HCLS1-F | GGTCGGTTTGGAGTAGAAAGAGACC | 360 | 1675 |
| HCLS1-R | CCCTCTCAAGTCCGTACTTGCC | 360 | 1676 |
| HCLS1-P | TGGGCCATGAGTATGTTGCC | 50 | 1677 |
| ISG15-F | CTTCGAGGGGAAGCCCCTGGAG | 360 | 1678 |
| ISG15-R | CCTGCTCGGATGCTGGTGGAGC | 360 | 1679 |
| ISG15-P | CATGAATCTGCGCCTGCGGGG | 50 | 1680 |
| IL16-F | GCCCAGTGACCCAAACATCCCC | 360 | 1681 |
| IL16-R | CAAAGCTATAGTCCATCCGAGCCTCG | 360 | 1682 |
| IL16-P | GATAAAACACCCACTGCTTAAG | 50 | 1683 |
| OASL-F | CCCTGGGGCCTTCTCTTCCCA | 360 | 1684 |
| OASL-R | CCGCAGGCCTTGATCAGGC | 360 | 1685 |
| OASL-P | CCCAGCCACCCCCTGAGGTC | 50 | 1686 |
| ADGRE5-F | CCATCCAGAATGTCATCAAATTGGTGGA | 360 | 1687 |
| ADGRE5-R | GGACAGGTGGCGCCAGGG | 360 | 1688 |
| ADGRE5-P | GAACTGATGGAAGCTCCTGGAGAC | 50 | 1689 |
| TTC17-F | GGACGGAAAATCCAGCAGC | 360 | 1690 |
| TTC17-R | CTTCTTGTCTCATTAATATGACTAGG | 360 | 1691 |
| TTC17-P | CACCAATGAACTTGAAGCATCC | 50 | 1692 |
| G6PD-F | GCGACGACGACGAAGCGC | 360 | 1693 |
| G6PD-R | CGCAGGATCCCGCACACC | 360 | 1694 |
| G6PD-P | GGCAGAGCAGGTGGCCCT | 50 | 1695 |
| HERC6-F | GTTTCCTGCCAAGCCTAAACC | 360 | 1696 |
| HERC6-R | GAGCCAGTGGGAAAGGAAGG | 360 | 1697 |
| HERC-P | GAATGCTGTGTGGACTCTCC | 50 | 1698 |
| LAP3-F | CTAGTAGTAAAACCGAGGTCCA | 360 | 1699 |
| LAP3-R | GTGAATTTCCAAGAAGACTGGG | 360 | 1700 |
| LAP3-P | GTCTTGGATTGAGGAAACAGGC | 50 | 1701 |
| NUP160-F | TGATGGAGAATGCACAGCTGC | 360 | 1702 |
| NUP160-R | ATGCGAGCCAAGGAACACTC | 360 | 1703 |
| NUP160-P | TCCTGGAACTGGAAGATCTGG | 50 | 1704 |
| TPP1-F | AATGTGTTCCCACGGCCTTC | 360 | 1705 |
| TPP1-R | GTAGGCACGGCCACTGGC | 360 | 1706 |
| TPP-P | GAGCTCTAGCCCCCACCT | 50 | 1707 |
| ARL6IP5-F | GGAGGAGTCATGGTCTTTGTGTTTGG | 360 | 1708 |
| ARL6IP5-R | ATGCCCATCGGTGTCCTCTTC | 360 | 1709 |
| ARL6IP5-P | TGATGTTTATCCATGCATCGTTGAGAC | 50 | 1710 |
| ENTPD1-F | GGAGCACATCCATTTCATTGGCA | 360 | 1711 |
| ENTPD1-R | GCTGGGATCATGTTGGTCAGG | 360 | 1712 |
| ENTPD1-P | ATCCAGGGCAGCGACGC | 50 | 1713 |
| HEATR1-F | CCCACTGCTACAAAGATCTTGGATTC | 360 | 1714 |
| HEATR1-R | CCAAGAGCACCCTCAACTGAG | 360 | 1715 |
| HEATR1-P | CTGAGTACCCGGGCAGCT | 50 | 1716 |
| TNFSF8-F | GGTGGCCACTATTATGGTGTTGG | 360 | 1717 |
| TNFSF8-R | GAGCAATTTCCTCCTTTGAGGGG | 360 | 1718 |
| TNFSF8-P | CATTCCCAACTCACCTGACAACG | 50 | 1719 |

[0552] Gently mix the master mixes by flicking or by vortexing, and then pulse spin. Add 15 μL of qPCR Master Mix to each well at room temperature.

[0553] In a template area, add 130 μL of Test Diluent to each cDNA product from the RT Reaction. Reseal the plate tightly and vortex the plate to mix thoroughly.

[0554] Add 10 μL of diluted cDNA product to each well according to the plate layout.

[0555] Mix by gentle pipetting. Avoid forming bubbles in the wells.

[0556] Cover wells with an optical seal.

[0557] Spin the plate to remove any bubbles (1 minute at 400×g).

[0558] Place on real-time thermal cycler pre-programmed with the settings above.

[0559] Click Start. Click Save and Continue. Before leaving the instrument, it is recommended to verify that the run started successfully by displaying a time under Estimated Time Remaining.

[0560] Note: Do not open the qPCR plate at any point after amplification has begun.

[0561] When amplification has completed, discard the unopened plate.

[0562] Software, Interpretation of Results and Quality Control

[0563] Software is specifically designed to integrate with the output of PCR machines and to apply an algorithm based on the use of multiple biomarkers. The software takes into account appropriate controls and reports results in a desired format.

[0564] When the run has completed on the ABI 7500 Fast Dx Instrument, complete the steps below in the application 7500 Fast System with 21 CFR Part 11 Software, ABI software SDS v1.4.

[0565] Click on the Results tab in the upper left corner.

[0566] Click on the Amplification Plot tab in the upper left corner.

[0567] In the Analysis Settings area, select an auto baseline and manual threshold for all targets. Enter 0.01 as the threshold.

[0568] Click on the Analyze button on the right in the Analysis Settings area.

[0569] From the menu bar in the upper left, select File then Close.

[0570] Complete the form in the dialog box that requests a reason for the change. Click

[0571] OK.

[0572] Transfer the data file (.sds) to a separate computer running the specific assay RT-qPCR Test Software.

[0573] Launch the assay RT-qPCR Test Software. Log in.

[0574] From the menu bar in the upper left, select File then Open.

[0575] Browse to the location of the transferred data file (.sds). Click OK.

[0576] The data file will then be analyzed using the assay's software application for interpretation of results.

[0577] Interpretation of Results and Quality Control

[0578] Results

[0579] Launch the interpretation software. Software application instructions are provided separately.

[0580] Following upload of the .sds file, the Software will automatically generate classifier scores for controls and clinical specimens.

[0581] Controls

[0582] The Software compares each CON (control) specimen (CONN, CONL, CONN) to its expected result. The controls are run in singleton.

| Control specimen | | |
|---|---|---|
| Designation | Name | Expected result |
| CONH | High Control | Score range |
| CONL | Low Control | Score range |
| CONN | Negative Control | Score range |
| NTC | No Template Control | Fail (no Ct for all targets) |

[0583] If CONN, CONL, and/or CONN fail the batch run is invalid and no data will be reported for the clinical specimens. This determination is made automatically by the interpretive software. The batch run should be repeated starting with either a new RNA preparation or starting at the RT reaction step.

[0584] If NTC yields a result other than Fail (no Ct for all targets), the batch run is invalid and no data may be reported for the clinical specimens. This determination is made by visual inspection of the run data. The batch run should be repeated starting with either a new RNA preparation or starting at the RT reaction step.

[0585] If a second batch run fails, please contact technical services. If both the calibrations and all controls are valid, then the batch run is valid and specimen results will be reported.

[0586] Specimens

[0587] Note that a valid batch run may contain both valid and invalid specimen results.

[0588] Analytical criteria (e.g., Ct values) that qualify each specimen as passing or failing (using pre-determined data) are called automatically by the software.

[0589] Scores out of range—reported.

[0590] Quality Control

[0591] Singletons each of the Negative Control, Low Positive Control, and High Positive Control must be included in each batch run. The batch is valid if no flags appear for any of these controls.

[0592] A singleton of the No Template Control is included in each batch run and Fail (no Ct for all targets) is a valid result indicating no amplifiable material was detectable in the well.

[0593] The negative control must yield a Negative result. If the negative control is flagged as Invalid, then the entire batch run is invalid.

[0594] The low positive and high positive controls must fall within the assigned ranges. If one or both of the positive controls are flagged as Invalid, then the entire batch run is invalid.

### Example 12

### Detection of Pathogen Specific Biomarkers

[0595] An example workflow for measuring pathogen (bacterial, viral, protozoal) nucleic acid in whole blood will now be described. The workflow is largely similar to that for detecting host response specific biomarkers but involves a number of unique steps. Specific enrichment of pathogens, especially from whole blood, may be required upstream of nucleic acid detection. Nucleic acid is amplified using specific or broad-range forward and reverse primers and the amplicon is detected using fluorescence-labelled probes and a qPCR instrument (e.g., Applied Biosystems 7500 Fast Dx Real-Time PCR Instrument, Applied Biosystems, Foster City, Calif., catalogue number 440685; K082562). Appropriate positive and negative controls need to be used to ensure that the assay has worked and that contamination has not occurred. In part, some steps depend upon availability of automated platforms and specific cartridges designed to enrich, isolate and amplify pathogen nucleic acids.

[0596] Bacterial DNA transcripts are each amplified, detected, and quantified in a single multiplexed reaction using a pair of forward and reverse primers and three probes. The forward and reverse primers are broad-range, designed to 16S rDNA and amplify a large number of bacterial species. The probes are designed to identify DNA sequences unique to Gram positive and Gram negative bacteria. Viral DNA transcripts are detected using assays designed specifically for viruses that cause a viremia and for which anti-viral medicines are available, including Influenza A and B, Hepatitis B virus, Hepatitis C virus, Human Immunodeficiency Virus 1 and 2 (HIV-1, -2), Cytomegalovirus (CMV), Varicella Zoster Virus (VZV), Herpes Simplex Virus 1 and 2 (HSV-1 and -2), Epstein Barr Virus (EBV). Alternatively, and for detection of such viruses, commercially available kits could be used, for example, HBV Digene Hybrid Capture II Microplate assay (Digene/Qiagen), Luminex (12212 Technology Blvd. Austin, Tex. 78727 United States), xTAG® Respiratory Viral Panel, Seegene (Washingtonian Blvd. Suite 290 Gaithersburg, Md. 20878 U.S.A.) Respiratory Virus Detection Assay. Protozoal DNA transcripts are each amplified, detected, and quantified in a single multiplexed reaction using three pairs of forward and reverse primers and four probes. The forward and reverse primers are designed to known common protozoal pathogens and the probes are designed to differentiate key protozoal species.

[0597] Blood (approximately 0.5 mL) collected into anti-coagulant is processed using a proprietary method, a commercially available kit, or a cartridge designed for use on a point-of-care instrument, and according to the manufacturer's instructions. Microbial DNA may need to be enriched from whole blood prior to performing PCR because the amount of background host DNA in blood reduces the effectiveness and sensitivity of downstream assays designed to detect bacterial DNA. Proprietary methods or commercially available kits or cartridges associated with a point-of-care instrument can be used. A proprietary method could involve the steps of: 1). lysis of microbes through chemical or mechanical means 2). proteolytic digestion in the presence of chaotropic agents and detergents 3).addition of magnetic silicon beads 4). isolation and washing of the beads 5). elution of nucleic acid from the beads. An example bacterial DNA enrichment kit for use on whole blood is MolYsis® Pathogen DNA Isolation (Molzym Life Science, GmbH & Co. KG Mary-Astell-Strasse 10 D-28359 Bremen, Germany) and an example automated machine is Polaris® by Biocartis (Biocartis N V, Generaal De Wittelaan 11 B3 2800 Mechelen Belgium). Other companies, such as Curetis AG and Enigma Limited provide sample preparation methodologies upstream of their proprietary testing cartridges. Kits and automated machines that enrich bacterial DNA from whole blood generally rely on selective lysis of mammalian host cells, digestion of host cell DNA using DNAse enzymes, and filtration and lysis of microbial cells. European patent 2333185 entitled “Selective Lysis of Cells” describes the general procedure. Example commercial kits that enrich for microbial and viral DNAs from whole blood are ApoH Captovir® and ApoH Captobac® (ApoH Technologies, 94, Allée des fauvettes 34 280 La Grande Motte FRANCE). Virus-specific DNA or RNA can be detected in plasma (HIV-1, -2, HBV, HCV, Influenza A and B), whole blood (HCV), or white-blood-cell-enriched fractions (HBV, HCV, herpes viruses). In some instances protozoan DNA needs to be enriched from whole blood (Plasmodium, Babesia), red blood cells (Plasmodium, Babesia), plasma (Trypanosoma), or white blood cells (Toxoplasma, Leishmania) so that it can be sensitively detected in the host DNA milieu. Example methods that enrich for malarial protozoa from whole blood are described in: Venkatesan M, Amaratunga C, Campino S, Auburn S, Koch O, et al. (2012) Using CF11 cellulose columns to inexpensively and effectively remove human DNA from Plasmodium falciparum-infected whole blood samples. Malaria journal 11: 41 and; Trang D T X, Huy N T, Kariu T, Tajima K, Kamei K (2004) One-step concentration of malarial parasite-infected red blood cells and removal of contaminating white blood cells. Malar J 3: 7. An example method that enriches for Trypanosoma from plasma is described in: Nagarkatti R, Bist V, Sun S, Fortes de Araujo F, Nakhasi H L, et al. (2012) Development of an Aptamer-Based Concentration Method for the Detection of Trypanosoma cruzi in Blood. PLoS ONE 7: e43533. An example method that enriches for Leishmania from white blood cells in whole blood is described in: Mathis A, Deplazes P (1995) PCR and in vitro cultivation for detection of Leishmania spp. in diagnostic samples from humans and dogs. Journal of Clinical Microbiology 33: 1145-1149. An example method that enriches for Toxoplasma from white blood cells in whole blood is described in: Colombo F A, Vidal J E, Oliveira A C P D, Hernandez A V, Bonasser-Filho F, et al. (2005) Diagnosis of Cerebral Toxoplasmosis in AIDS Patients in Brazil: Importance of Molecular and Immunological Methods Using Peripheral Blood Samples. Journal of Clinical Microbiology 43: 5044-5047. An example method that enriches for Babesia from red blood cells in whole blood is described in: Persing D H, Mathiesen D, Marshall W F, Telford S R, Spielman A, et al. (1992) Detection of Babesia microti by polymerase chain reaction. Journal of Clinical Microbiology 30: 2097-2103. Once enriched, microbial, viral or protozoan DNA should be processed immediately or stored in single-use volumes at or below −70° C. for later processing.

[0598] The downstream amplification, detection and interpretation of qPCR for bacterial DNA is similar to that described in the first example host response workflow but without the need for reverse transcription. Some viruses (RNA viruses, e.g., Influenza) require a reverse transcription step prior to performing qPCR.

[0599] Example forward (F) and reverse (R) primers and probes (P) and their final reaction concentration for detecting bacterial DNA are contained in TABLE I.

TABLE I

| | | SEQ | Reaction |
|---|---|---|---|
| Reagent | 5′-3′ Sequence | ID NO. | nM |
| Bacterial-F | ACTCCTACGGGAGGCAGCAGT | 1720 | 800 nM |
| Bacterial-R | GTATTACCGCGGCTGCTGGCA | 1721 | 800 nM |
| G+/−P1 | AGCAACGCCGCGT | 1722 | 250 nM |
| G+/−P2 | AGCGACGCCGCGT | 1723 | 100 nM |
| G+/−P | AGCCATGCCGCGT | 1724 | 200 nM |

[0600] Example forward (F) and reverse (R) primers and probes (P) and the protozoan parasitic DNA detected are contained in TABLE G supra.

[0601] Example forward (F) and reverse (R) primers and probes for common human pathogenic viruses that cause systemic inflammation and viremia are listed in TABLE F supra, which are disclosed for example in the following references: Watzinger, F., Suda, M., Preuner, S., Baumgartinger, R., Ebner, K., Baskova, L., et al. (2004). Real-time quantitative PCR assays for detection and monitoring of pathogenic human viruses in immunosuppressed pediatric patients. Journal of Clinical Microbiology, 42(11), 5189-5198; Pripuzova N, Wang R, Tsai S, Li B, Hung G-C, et al. (2012) Development of Real-Time PCR Array for Simultaneous Detection of Eight Human Blood-Borne Viral Pathogens. PLoS ONE 7: e43246; van Elden L J R, Nijhuis M, Schipper P, Schuurman R, van Loon A M (2001) Simultaneous Detection of Influenza Viruses A and B Using Real-Time Quantitative PCR. Journal of Clinical Microbiology 39: 196-200; U.S. Pat. No. 5,962,665 (application Ser. No. 08/876,546); Pas S D, Fries E, De Man R A, Osterhaus A D, Niesters H G (2000) Development of a quantitative real-time detection assay for hepatitis B virus DNA and comparison with two commercial assays. Journal of Clinical Microbiology 38: 2897-2901; Namvar L, Olofsson S, Bergstrom T, Lindh M (2005) Detection and Typing of Herpes Simplex Virus (HSV) in Mucocutaneous Samples by TaqMan PCR Targeting a gB Segment Homologous for HSV Types 1 and 2. Journal of Clinical Microbiology 43: 2058-2064; Mentel, R. (2003). Real-time PCR to improve the diagnosis of respiratory syncytial virus infection. Journal of Medical Microbiology, 52(10), 893-896; Do, D. H., Laus, S., Leber, A., Marcon, M. J., Jordan, J. A., Martin, J. M., & Wadowsky, R. M. (2010). A One-Step, Real-Time PCR Assay for Rapid Detection of Rhinovirus. The Journal of Molecular Diagnostics, 12(1), 102-108; Fellner, M. D., Durand, K., Rodriguez, M., Irazu, L., Alonio, V., & Picconi, M. A. (2014). Duplex realtime PCR method for Epstein-Barr virus and human DNA quantification: its application for post-transplant lymphoproliferative disorders detection. The Brazilian Journal of Infectious Diseases, 18(3), 271-280; Sanchez, J. L., & Storch, G. A. (2002). Multiplex, Quantitative, Real-Time PCR Assay for Cytomegalovirus and Human DNA. Journal of Clinical Microbiology, 40(7), 2381-2386; Collot, S., Petit, B., Bordessoule, D., Alain, S., Touati, M., Denis, F., & Ranger-Rogez, S. (2002). Real-Time PCR for Quantification of Human Herpesvirus 6 DNA from Lymph Nodes and Saliva. Journal of Clinical Microbiology, 40(7), 2445-2451; Akiyama, M., Kimura, H., Tsukagoshi, H., Taira, K., Mizuta, K., Saitoh, M., et al. (2009). Development of an assay for the detection and quantification of the measles virus nucleoprotein (N) gene using real-time reverse transcriptase PCR. Journal of Medical Microbiology, 58(5), 638-643; Lanciotti, R. S., Kerst, A. J., Nasci, R. S., Godsey, M. S., Mitchell, C. J., Savage, H. M., et al. (2000). Rapid detection of west nile virus from human clinical specimens, field-collected mosquitoes, and avian samples by a TaqMan reverse transcriptase-PCR assay. Journal of Clinical Microbiology, 38(11), 4066-4071; Moës, E., Vijgen, L., Keyaerts, E., Zlateva, K., Li, S., Maes, P., et al. (2005). BMC Infectious Diseases. BMC Infectious Diseases, 5(1), 6-10; Neske, F., Blessing, K., Tollmann, F., Schubert, J., Rethwilm, A., Kreth, H. W., & Weissbrich, B. (2007). Real-time PCR for diagnosis of human bocavirus infections and phylogenetic analysis. Journal of Clinical Microbiology, 45(7), 2116-2122; Verstrepen, W. A., Kuhn, S., Kockx, M. M., Van De Vyvere, M. E., & Mertens, A. H. (2001). Rapid Detection of Enterovirus RNA in Cerebrospinal Fluid Specimens with a Novel Single-Tube Real-Time Reverse Transcription-PCR Assay. Journal of Clinical Microbiology, 39(11), 4093-4096; Logan, C., O'Leary, J. J., & O'Sullivan, N. (2006). Real-Time Reverse Transcription-PCR for Detection of Rotavirus and Adenovirus as Causative Agents of Acute Viral Gastroenteritis in Children. Journal of Clinical Microbiology, 44(9), 3189-3195; Chigor, V., & Okoh, A. (2012). Quantitative RT-PCR Detection of Hepatitis A Virus, Rotaviruses and Enteroviruses in the Buffalo River and Source Water Dams in the Eastern Cape Province of South Africa. International Journal of Environmental Research and Public Health, 9(12), 4017-4032; Ito, M., Takasaki, T., Yamada, K. I., Nerome, R., Tajima, S., & Kurane, I. (2004). Development and Evaluation of Fluorogenic TaqMan Reverse Transcriptase PCR Assays for Detection of Dengue Virus Types 1 to 4. Journal of Clinical Microbiology, 42(12), 5935-5937; Nix, W. A., Maher, K., Johansson, E. S., Niklasson, B., Lindberg, A. M., Pallansch, M. A., & Oberste, M. S. (2008). Detection of all known parechoviruses by real-time PCR. Journal of Clinical Microbiology, 46(8), 2519-2524; McQuaig, S. M., Scott, T. M., Lukasik, J. O., Paul, J. H., & Harwood, V. J. (2009). Quantification of Human Polyomaviruses JC Virus and BK Virus by TaqMan Quantitative PCR and Comparison to Other Water Quality Indicators in Water and Fecal Samples. Applied and Environmental Microbiology, 75(11), 3379-3388; Raymond, F., Carbonneau, J., Boucher, N., Robitaille, L., Boisvert, S., Wu, W. K., et al. (2009). Comparison of Automated Microarray Detection with Real-Time PCR Assays for Detection of Respiratory Viruses in Specimens Obtained from Children. Journal of Clinical Microbiology, 47(3), 743-750; Kato, T., Mizokami, M., Mukaide, M., Orito, E., Ohno, T., Nakano, T., et al. (2000). Development of a TT virus DNA quantification system using real-time detection PCR. Journal of Clinical Microbiology, 38(1), 94-98; Xiao, X.-L., He, Y.-Q., Yu, Y.-G., Yang, H., Chen, G., Li, H.-F., et al. (2008). Simultaneous detection of human enterovirus 71 and coxsackievirus A16 in clinical specimens by multiplex real-time PCR with an internal amplification control. Archives of Virology, 154(1), 121-125.

[0602] Important controls in pathogen detection assays, especially broad-range PCR assays, include the use of 1). a process control 2). a no-template control 3). internal amplification control. A process control added to the clinical sample and detection demonstrates successful pathogen enrichment, isolation and amplification. For the bacterial and protozoal assays described here an appropriate process control is Stenotrophomonas nitritireducens, since it is a harmless soil organism and its 16S rDNA is not amplified by the described broad range forward and reverse primers. Specific forward and reverse primers and a probe are required to detect this organism. Armored RNA (Life Technologies) is an example of a process control that could be used in the viral assays described herein, and again, specific forward and reverse primers and a probe are required to detect this control. A no-template control (e.g., nucleic-acid-free phospate buffered saline) run in parallel demonstrates the level of contamination or background nucleic acid. Broad-range PCR detects many microorganisms commonly found in and on water, soil, human skin, material surfaces, reagents, Taq polymerase, blood collection tubes and chemical preparations. As such, it is almost impossible to eliminate contaminating bacterial nucleic acid. A known level of contaminating or background nucleic acid, determined by running a no-template control, can be subtracted from the results obtained for a clinical sample. An internal amplification control run as part of a PCR demonstrate successful amplification. A synthetic DNA (with no known homology to natural DNA sequence), specific primers and a probe spiked into the PCR reaction are required to detect this control.

### Example 13

### Host Response Example Outputs (BaSIRS, VaSIRS, PaSIRS)

[0603] Possible example outputs from the software for BaSIRS, VaSIRS, PaSIRS assays run and analyzed individually are presented in FIGS. 27, 28 and 29. The format of such reports depends on many factors including; quality control, regulatory authorities, cut-off values, the algorithm used, laboratory and clinician requirements, likelihood of misinterpretation.

[0604] The host response assays are called “SeptiCyte MICROBE”, “SeptiCyte VIRUS” and “SeptiCyte PROTOZOAN”. The results are reported as a number representing a position on a linear scale, and a probability of the patient having BaSIRS, VaSIRS or PaSIRS based on historical results and the use of pre-determined cut-offs (using results from clinical studies). Results of controls within the assays may also be reported. Other information that could be reported might include: previous results and date and time of such results, a prognosis, a scale that provides cut-off values for historical testing results that separate the conditions of healthy, BaSIRS, VaSIRS, PaSIRS and InSIRS such that those patients with higher scores are considered to have more severe BaSIRS, VaSIRS or PaSIRS.

### Example 14

### Combining Host Response Signatures and Example Outputs

[0605] One method of combining the four host response signatures is to calculate a probability of a subject, or subjects, having each of the conditions, as described below.

[0606] Additional datasets independent of the discovery process were used including; GSE70311 (Trauma patients that developed bacterial sepsis), GSE34205 (Influenza), GSE5418 (Malaria-infection) and GSE76293 (Bacterial). These datasets included at least one clinical group from each of the pathologies of interest, i.e. bacterial, protozoal and viral infections and a similar control group (InSIRS).

[0607] Each of the datasets was log₂ transformed and then the final score was linearly shifted to align each of the control groups across all of the datasets. This latter approach was required because the data were produced on different machines under different study conditions. Because the discovery process for each of the signatures (BaSIRS, VaSIRS, PaSIRS, InSIRS) involved a subtraction step to ensure specificity (signal for conditions other than the one of interest were subtracted), displacing the score in this manner controlled for this variability without losing biological signal.

[0608] Probabilities were then calculated by mapping the raw scores through a logit function via a logistic regression model. A one-vs-all response label was set because each of the signatures (BaSIRS, VaSIRS, PaSIRS, InSIRS) had been developed and designed to force non-specific infections into the control group (e.g., for the BaSIRS all non-BaSIRS conditions (VaSIRS, PaSIRS, InSIRS) were treated as controls). Each of the signatures were then applied to each sample and probabilities for each individual sample were calculated using a leave-one-out cross validation (LOO-CV). FIG. 37 demonstrates the use of this approach, through box and whisker plots, for the four host response signatures when using various datasets representing the four conditions.

[0609] Possible example patient report outputs from the software for BaSIRS, VaSIRS, PaSIRS and InSIRS assays combined are presented in FIGS. 30, 31, 32 and 33. The format of such reports depends on many factors including; quality control, regulatory authorities, cut-off values, the algorithm used, laboratory and clinician requirements, likelihood of misinterpretation.

[0610] The combined host response assay is called “SeptiCyte SPECTRUM”. The result is reported as numbers representing positions on linear scales, and a probability of the patient having BaSIRS, VaSIRS, PaSIRS or InSIRS based on historical results and the use of pre-determined cut-offs (using results from clinical studies). Results of controls within the assays may also be reported. Other information that could be reported might include: previous results and date and time of such results, a prognosis, a scale that provides cut-off values for historical testing results that separate the conditions of healthy, InSIRS, BaSIRS, VaSIRS, PaSIRS and InSIRS such that those patients with higher scores are considered to have more severe BaSIRS, VaSIRS, PaSIRS or InSIRS.

### Example 15

### Combination of Host Response Specific Biomarkers Assay Output and Pathogen Specific Biomarkers Assay Output—Example Output (BaSIRS and BIP Combined)

[0611] Possible example output from software that combines the results for a host response specific biomarker assay (e.g., BaSIRS) and a pathogen specific biomarker assay (e.g., BIP) for over 50 patients suspected of sepsis and over 50 healthy volunteers is presented in FIG. 34. A similar output is envisaged for a single patient. In this instance, SeptiScore (results of a BaSIRS host response specific biomarker assay) on a scale of −2-12 are plotted on the Y axis, and SeptID (results of a BIP pathogen specific biomarker assay on a reverse scale of 40-20, representing the output of a real-time PCR assay in Ct values) are plotted on the X axis. The higher the SeptiScore the higher the likelihood that a particular patient has BaSIRS. The lower the SeptID score the higher the concentration of bacterial DNA in the sample taken from a patient. Thus, patients with a high SeptiScore and a low SeptID score have a higher probability (or “likelihood”) of BaSIRS compared to patients with a low SeptiScore and a high SeptID score. In FIG. 34, those patients that were ultimately shown to be blood culture positive are circled in the top right of the plot—that is, such patients had a high SeptiScore and low SeptID score. Healthy volunteers had low SeptiScore values and a range (27->40) of SeptID scores.

[0612] In this instance the value of combining host response specific biomarkers with pathogen specific biomarkers is; 1) increased positive predictive value in those samples that are positive for both assays, 2) increased negative predictive value in those samples that are negative for both assays, 3) capturing those patients that were retrospectively diagnosed as sepsis and had high SeptiScores, but were blood culture negative, 4) indicating which samples might be contaminated (low SeptiScore, high pathogen detection), and 5) confirmation of blood culture results in a shorter time frame.

[0613] Similar outputs are envisaged for: the combination of VaSIRS biomarker assay results and VIP biomarker assay results, and the combination of PaSIRS biomarker assay results and PIP biomarker assay results. A report may contain individual plots for each of the conditions (bacterial, viral and protozoal) or a plot that combines the results for each of these conditions. The format of such reports therefore depends on many factors including; the suspected conditions that the patient has (e.g., bacterial, viral, protozoal), the number and type of assays that are run, quality control, regulatory authority requirements, pre-determined cut-off values, the algorithm used, laboratory and clinician requirements, likelihood of misinterpretation.

[0614] In a patient report other information could be conveyed, including: probability of a patient having a particular condition based on historical results, results of controls run, previous results and date and time of such results, a prognosis, a scale that provides cut-off values for historical testing results that separate the conditions of healthy, BaSIRS, VaSIRS, PaSIRS and InSIRS such that those patients with higher scores are considered to have more severe BaSIRS, VaSIRS, PaSIRS or InSIRS.

### Example 16

### Combination of Host Response Specific Biomarkers Assay Output and Pathogen Specific Biomarkers Assay Output—Example Output (VaSIRS and VIP Combined)

[0615] Possible example output from software that combines the results for a host response specific biomarker assay (e.g., VaSIRS) and a pathogen specific biomarker assay (e.g., VIP) for over 200 patients suspected of sepsis for which some were concurrently tested for the presence of virus antigen is shown in FIG. 35. A similar output is envisaged for a single patient. In this instance, the VaSIRS signature result is plotted on the Y axis and patients with positive viral pathogen results are circled (with varying sized circles for different virus types). In particular, those patients positive for influenza and RSV virus antigens are also strongly positive for VaSIRS signature. The value of combining host response specific biomarkers (VaSIRS signature) with pathogen specific biomarkers is; 1) increased positive predictive value in those samples that are positive for both assays, 2) increased negative predictive value in those samples that are negative for both assays, and 3) confirmation of virus pathogen detection assay results (not an incidental finding or commensal virus).

### Example 17

### Example Workflow on Automated Machines

[0616] A second example automated workflow will now be described. Machines have been, and are being, developed that are capable of processing a patient sample at point-of-care, or near point-of-care. Such machines require few molecular biology skills to run and are aimed at non-technical users. The idea is that the sample would be pipetted directly into a disposable cartridge(s) that is/are then inserted into the machine. One cartridge may be able to run a host response assay and pathogen assay in combination, or separate cartridges may be required to run each assay separately. In both instances the results of each assay will be combined algorithmically following completion of the assay. For determining host response specific biomarkers the cartridge will need to extract high quality RNA from the host cells in the sample for use in reverse transcription followed by RT-PCR. For determining pathogen specific biomarkers the cartridge will need to extract high quality pathogen nucleic acid from the cells in the sample, and away from potentially interfering host nucleic acid, for use in RT-PCR, or reverse transcription followed by RT-PCR. The machines are designed for minimum user interaction such that the user presses “Start” and within 1-3 hours results are generated. The cartridges contains all of the required reagents to perform host cell and pathogen nucleic acid extraction (RNA and/or DNA), reverse transcription, and qRT-PCR, and the machine has appropriate software incorporated to allow use of algorithms to interpret each result and combine results, and final interpretation and printing of results.

[0617] Fresh, whole, anti-coagulated blood can be pipetted into a specialized cartridge (e.g., cartridges designed for Enigma ML machine by Enigma Diagnostics Limited (Enigma Diagnostics Limited, Building 224, Tetricus Science Park, DstI, Porton Down, Salisbury, Wiltshire SP4 0JQ) or similar (Unyvero, Curetis A G, Max-Eyth-Str. 42 71088 Holzgerlingen, Germany) (Biocartis N V, Generaal De Wittelaan 11 B3, 2800 Mechelen, Belgium)), and on-screen instructions followed to test for differentiating a BaSIRS, VaSIRS, PaSIRS or InSIRS. For determining host response specific biomarkers, inside the machine RNA is first extracted from the whole blood and is then converted into cDNA. The cDNA is then used in qRT-PCR reactions. For determining pathogen specific biomarkers, inside the machine pathogen nucleic acid is first extracted (possibly selectively) from the whole blood and is then used directly in qRT-PCR reactions, or converted into cDNA and then used in qRT-PCR reactions. The reactions are followed in real time and Ct values calculated. On-board software generates a result output (see, FIGS. 30-33). Appropriate quality control measures for RNA and DNA quality, a process control, no template controls, high and low template controls and expected Ct ranges ensure that results are not reported erroneously.

### Example 18

### Example Algorithms Combining Derived Biomarkers for Assessing SIRS

[0618] Derived biomarkers can be used in combination to increase the diagnostic power for separating various conditions. Determining which markers to use, and how many, for separating various conditions can be achieved by calculating Area Under Curve (AUC).

[0619] As such, and by example, immune host response biomarker profiles using four to six biomarkers can offer the appropriate balance between simplicity, practicality and commercial risk for diagnosing BaSIRS, VaSIRS, PaSIRS or InSIRS. Further, equations using four to six biomarkers weighs each biomarker equally which provides robustness in cases of analytical or clinical variability.

[0620] One example equation (amongst others) that provides good diagnostic power for diagnosing a BaSIRS is:

Diagnostic Score=(TSPO−HCLS1)+(OPLAH−ZHX2)
[0621] Note: each marker in the Diagnostic Score above is the Log 2 transformed concentration of the marker in the sample.

[0622] One example equation (amongst others) that provides good diagnostic power for diagnosing a VaSIRS is:

Diagnostic Score=(IL16−ISG15)+(ADGRE5−OASL)
[0623] Note: each marker in the Diagnostic Score above is the Log 2 transformed concentration of the marker in the sample.

[0624] One example equation (amongst others) that provides good diagnostic power for diagnosing a PaSIRS is:

Diagnostic Score=(TTC17−G6PD)+(HERC6−LAP3)+(NUP160−TPP1)
[0625] Note: each marker in the Diagnostic Score above is the Log 2 transformed concentration of the marker in the sample.

[0626] One example equation (amongst others) that provides good diagnostic power for diagnosing a INSIRS is:

Diagnostic Score=(ARL6IIP5−ENTPD1)+(HEATR1−TNFSF8)
[0627] Note: each marker in the Diagnostic Score above is the Log 2 transformed concentration of the marker in the sample.

### Example 19

### Validation of Derived Biomarkers for BaSIRS and VaSIRS on a Pediatric Patient Sample Set

[0628] The best performing pairs of host response derived biomarkers for BaSIRS and VaSIRS (TSPO/HCLS1+OPLAH/ZHX2 and IL16/ISG15+ADGRE5/OASL) were further validated on an independent pediatric patient sample set. In this study, samples were collected from three groups of patients including 1). SIRS following cardiopulmonary bypass surgery (n=12) (“Control” in FIG. 36), 2). Sepsis (SIRS+confirmed or strongly suspected bacterial infection) (n=28) (“Sepsis” in FIG. 36), 3). Severe respiratory virus-infected (n=6) (“Virus” in FIG. 36). For SIRS patients, samples were taken within the first 24 hours following surgery and when the patient had at least two clinical signs of SIRS. Sepsis patients were retrospectively diagnosed by a panel of clinicians using all available clinical and diagnostic data. Virus-infected patients were also retrospectively diagnosed by a panel of clinicians using all available clinical and diagnostic data including the use of a viral PCR panel used on nasal or nasal/pharyngeal swabs (Biofire, FilmArray, Respiratory Panel, Biomerieux, 390 Wakara Way Salt Lake City, Utah 84108 USA). The respiratory viruses detected in these patients were: rhinovirus/enterovirus, parainfluenza 3, respiratory syncytial virus and coronavirus HKU1. Three of the six patients with a confirmed virus infection also had a confirmed or suspected bacterial infection. It should be noted that sepsis patients that were not suspected of having a viral infection were also tested with the Biofire FilmArray and nine of the 28 sepsis patients had a positive viral PCR. Thus, there is some overlapping etiologies/pathologies in the sepsis and viral groups which is illustrated in FIG. 36.

[0629] The disclosure of every patent, patent application, and publication cited herein is hereby incorporated herein by reference in its entirety.

[0630] The citation of any reference herein should not be construed as an admission that such reference is available as “Prior Art” to the instant application.

[0631] Throughout the specification the aim has been to describe the preferred embodiments of the invention without limiting the invention to any one embodiment or specific collection of features. Those of skill in the art will therefore appreciate that, in light of the instant disclosure, various modifications and changes can be made in the particular embodiments exemplified without departing from the scope of the present invention. All such modifications and changes are intended to be included within the scope of the appended claims.

### TABLES

TABLE 1
NON-LIMITING HUMAN PATHOGENS THAT ARE KNOWN
TO CAUSE SYSTEMIC INFLAMMATION AND BACTEREMIA,
VIREMIA OR PROTOZOAN PARASITEMIA

| Bacteria/Fungi | Viruses | Protozoans |
|---|---|---|
| Coagulase-negative | Respiratory Clinical Signs | Plasmodium falciparum |
| Staphylococcus (CoNS consist | Respiratory Syncytial Virus (RSV) | Plasmodium ovale |
| mainly of S. epidemidis, | Influenza A and B | Plasmodium malariae |
| saprophyticus and hominus) | Adenovirus | Plasmodium vivax |
| Staphylococcus, aureus | Parainfluenza virus 1, 2, 3 and 4 | Leishmania donovani |
| Enterococcus faecalis | Human Coronavirus types 229e, | Trypanosoma brucei |
| Escherichia coli | OC43, HKU1, NL-63 | Trypanosoma cruzi |
| Klebsiella pneumoniae | Rhinovirus | Toxoplasma gondii |
| Enterococcus faecium | SARS Coronavirus | Babesia microti |
| Streptococcus viridans group | Enterovirus | |
| (Streptococcus viridans group | BK virus | |
| includes: mitis, mutans, | Respiratory/Gastrointestinal | |
| oralis, sanginus, sobrinus and | Bocavirus | |
| milleri (anginosus, | Fever/Rash/Aches/Generalised | |
| constellatus, intermedius) | Measles | |
| Pseudomonas aeruginosa | Hantavirus | |
| Streptococcus pneumoniae | Cytomegalovirus | |
| Enterobacter cloacae | Varicella Zoster Virus | |
| Serratia marcescens | Herpes Simplex Virus | |
| Acinetobacter baumammii | Epstein Barr Virus | |
| Proteus mirabilis | Parechovirus | |
| Streptococcus agalactiae | Human immunodeficiency virus | |
| Klebsiella oxytoca | Hepatitis B virus | |
| Enterobacter aerogenes | HTLV1 and 2 | |
| Stenotrophomonas | Vaccinia virus | |
| maltophilia | West Nile Virus | |
| Citrobacter freundii | Coxsackie virus | |
| Streptococcus pyogenes | Parvovirus B19 | |
| Enterococcus avium | Dengue | |
| Bacteroides fragilis | Few Clinical Signs | |
| Bacteroides vulgatus | TTV (torque teno virus) | |
| | Hepatitis C virus | |

TABLE 2
COMMON HUMAN VIRUSES THAT CAUSE SIRS AS
PART OF THEIR PATHOGENESIS AND FOR WHICH
THERE ARE SPECIFIC ANTI-VIRAL TREATMENTS

| Virus | Reference |
|---|---|
| Influenza A and B | Wootton SH, Aguilera EA, Wanger A, |
| | Jewell A, Patel K, et al. (2014) |
| | Detection of NH1N1 influenza virus in |
| | nonrespiratory sites among children. |
| | Pediatr Infect Dis J 33: 95-96. |
| Hepatitis B virus | Pripuzova N, Wang R, Tsai S, Li B, |
| Hepatitis C virus | Hung G-C, et al. (2012) Development |
| Human immunodeficiency | of Real-Time PCR Array for Simulta- |
| virus 1 and 2 | neous Detection of Eight Human Blood- |
| | Borne Viral Pathogens. PLoS ONE 7: |
| | e43246. |
| Cytomegalovirus | Johnson G, Nelson S, Petric M, Tellier |
| Varicella Zoster Virus | R (2000) Comprehensive PCR-based assay |
| Herpes Simplex Virus | for detection and species identification |
| Epstein Barr Virus | of human herpesviruses. Journal of |
| | Clinical Microbiology 38: 3274-3279. |
| Respiratory Syncytial | Najarro, P., Angell, R., & Powell, K. |
| Virus | (2012). The prophylaxis and treatment |
| | with antiviral agents of respiratory |
| | syncytial virus infections. Antiviral |
| | Chemistry & Chemotherapy, 22(4), |
| | 139-150. |

TABLE 3
BASIRS BIOMARKER DETAILS INCLUDING;
SEQUENCE IDENTIFICATION NUMBER,
GENE SYMBOL, ENSEMBL TRANSCRIPT
ID AND DNA SEQUENCE

| SEQ ID | Gene | Ensembl Transcript |
|---|---|---|
| # DNA | Symbol | ID |
| 1 | ADAM19 | ENST00000257527 |
| 2 | ADM | ENST00000278175 |
| 3 | ALPL | ENST00000374840 |
| 4 | CAMK1D | ENST00000378845 |
| 5 | CASS4 | ENST00000360314 |
| 6 | CBLL1 | ENST00000440859 |
| 7 | CCNK | ENST00000389879 |
| 8 | CD82 | ENST00000227155 |
| 9 | CLEC7A | ENST00000353231 |
| 10 | CNNM3 | ENST00000305510 |
| 11 | COX15 | ENST00000370483 |
| 12 | CR1 | ENST00000400960 |
| 13 | DENND3 | ENST00000262585 |
| 14 | DOCK5 | ENST00000276440 |
| 15 | ENTPD7 | ENST00000370489 |
| 16 | EPHB4 | ENST00000358173 |
| 17 | EXTL3 | ENST00000220562 |
| 18 | FAM129A | ENST00000367511 |
| 19 | FBXO28 | ENST00000366862 |
| 20 | FIG4 | ENST00000230124 |
| 21 | FOXJ3 | ENST00000361346 |
| 22 | GAB2 | ENST00000340149 |
| 23 | GALNT2 | ENST00000366672 |
| 24 | GAS7 | ENST00000580865 |
| 25 | GCC2 | ENST00000309863 |
| 26 | GRK5 | ENST00000392870 |
| 27 | HAL | ENST00000261208 |
| 28 | HCLS1 | ENST00000314583 |
| 29 | HK3 | ENST00000292432 |
| 30 | ICK | ENST00000350082 |
| 31 | IGFBP7 | ENST00000295666 |
| 32 | IK | ENST00000417647 |
| 33 | IKZF5 | ENST00000617859 |
| 34 | IL2RB | ENST00000216223 |
| 35 | IMPDH1 | ENST00000338791 |
| 36 | INPP5D | ENST00000359570 |
| 37 | ITGA7 | ENST00000257879 |
| 38 | JARID2 | ENST00000341776 |
| 39 | KIAA0101 | ENST00000300035 |
| 40 | KIAA0355 | ENST00000299505 |
| 41 | KIAA0907 | ENST00000368321 |
| 42 | KLRD1 | ENST00000336164 |
| 43 | KLRF1 | ENST00000617889 |
| 44 | LAG3 | ENST00000203629 |
| 45 | LEPROTL1 | ENST00000321250 |
| 46 | LPIN2 | ENST00000261596 |
| 47 | MBIP | ENST00000416007 |
| 48 | MCTP1 | ENST00000515393 |
| 49 | MGAM | ENST00000549489 |
| 50 | MME | ENST00000460393 |
| 51 | NCOA6 | ENST00000359003 |
| 52 | NFIC | ENST00000341919 |
| 53 | NLRP1 | ENST00000269280 |
| 54 | NMUR1 | ENST00000305141 |
| 55 | NOV | ENST00000259526 |
| 56 | NPAT | ENST00000278612 |
| 57 | OPLAH | ENST00000618853 |
| 58 | PARP8 | ENST00000281631 |
| 59 | PCOLCE2 | ENST00000295992 |
| 60 | PDGFC | ENST00000502773 |
| 61 | PDS5B | ENST00000315596 |
| 62 | PHF3 | ENST00000393387 |
| 63 | PIK3C2A | ENST00000265970 |
| 64 | PLA2G7 | ENST00000274793 |
| 65 | POGZ | ENST00000271715 |
| 66 | PRKD2 | ENST00000433867 |
| 67 | PRKDC | ENST00000314191 |
| 68 | PRPF38B | ENST00000370025 |
| 69 | PRSS23 | ENST00000280258 |
| 70 | PYHIN1 | ENST00000368140 |
| 71 | QRICH1 | ENST00000357496 |
| 72 | RAB32 | ENST00000367495 |
| 73 | RBM15 | ENST00000618772 |
| 74 | RBM23 | ENST00000399922 |
| 75 | RFC1 | ENST00000349703 |
| 76 | RNASE6 | ENST00000304677 |
| 77 | RUNX2 | ENST00000371432 |
| 78 | RYK | ENST00000623711 |
| 79 | SAP130 | ENST00000259235 |
| 80 | SEMA4D | ENST00000438547 |
| 81 | SIDT1 | ENST00000264852 |
| 82 | SMPDL3A | ENST00000368440 |
| 83 | SPIN1 | ENST00000375859 |
| 84 | ST3GAL2 | ENST00000342907 |
| 85 | SYTL2 | ENST00000389960 |
| 86 | TGFBR3 | ENST00000212355 |
| 87 | TLE3 | ENST00000558939 |
| 88 | TLR5 | ENST00000366881 |
| 89 | TMEM165 | ENST00000381334 |
| 90 | TSPO | ENST00000337554 |
| 91 | UTRN | ENST00000367545 |
| 92 | YPEL1 | ENST00000339468 |
| 93 | ZFP36L2 | ENST00000282388 |
| 94 | ZHX2 | ENST00000314393 |

TABLE 4
BASIRS BIOMARKER DETAILS INCLUDING;
SEQUENCE IDENTIFICATION NUMBER,
GENE SYMBOL, GENBANK ACCESSION
AND AMINO ACID SEQUENCE

| SEQ ID | Gene | GenBank |
|---|---|---|
| # AA | Symbol | Accession |
| 95 | ADAM19 | NP_150377 |
| 96 | ADM | NP_001115 |
| 97 | ALPL | NP_000469 |
| 98 | CAMK1D | NP_065130 |
| 99 | CASS4 | NP_065089 |
| 100 | CBLL1 | NP_079090 |
| 101 | CCNK | NP_001092872 |
| 102 | CD82 | NP_002222 |
| 103 | CLEC7A | NP_072092 |
| 104 | CNNM3 | NP_060093 |
| 105 | COX15 | NP_004367 |
| 106 | CR1 | NP_000564 |
| 107 | DENND3 | NP_055772 |
| 108 | DOCK5 | NP_079216 |
| 109 | ENTPD7 | NP_065087 |
| 110 | EPHB4 | NP_004435 |
| 111 | EXTL3 | NP_001431 |
| 112 | FAM129A | NP_443198 |
| 113 | FBXO28 | NP_055991 |
| 114 | FIG4 | NP_055660 |
| 115 | FOXJ3 | NP_055762 |
| 116 | GAB2 | NP_036428 |
| 117 | GALNT2 | NP_004472 |
| 118 | GAS7 | NP_003635 |
| 119 | GCC2 | NP_852118 |
| 120 | GRK5 | NP_005299 |
| 121 | HAL | NP_002099 |
| 122 | HCLS1 | NP_005326 |
| 123 | HK3 | NP_002106 |
| 124 | ICK | NP_055735 |
| 125 | IGFBP7 | NP_001544 |
| 126 | IK | NP_006074 |
| 127 | IKZF5 | NP_001258769 |
| 128 | IL2RB | NP_000869 |
| 129 | IMPDH1 | NP_000874 |
| 130 | INPP5D | NP_005532 |
| 131 | ITGA7 | NP_002197 |
| 132 | JARID2 | NP_004964 |
| 133 | KIAA0101 | NP_055551 |
| 134 | KIAA0355 | NP_055501 |
| 135 | KIAA0907 | NP_055764 |
| 136 | KLRD1 | NP_002253 |
| 137 | KLRF1 | NP_057607 |
| 138 | LAG3 | NP_002277 |
| 139 | LEPROTL1 | NP_056159 |
| 140 | LPIN2 | NP_055461 |
| 141 | MBIP | NP_057670 |
| 142 | MCTP1 | NP_078993 |
| 143 | MGAM | NP_004659 |
| 144 | MME | NP_000893 |
| 145 | NCOA6 | NP_054790 |
| 146 | NFIC | NP_005588 |
| 147 | NLRP1 | NP_055737 |
| 148 | NMUR1 | NP_006047 |
| 149 | NOV | NP_002505 |
| 150 | NPAT | NP_002510 |
| 151 | OPLAH | NP_060040 |
| 152 | PARP8 | NP_078891 |
| 153 | PCOLCE2 | NP_037495 |
| 154 | PDGFC | NP_057289 |
| 155 | PDS5B | NP_055847 |
| 156 | PHF3 | NP_055968 |
| 157 | PIK3C2A | NP_002636 |
| 158 | PLA2G7 | NP_005075 |
| 159 | POGZ | NP_055915 |
| 160 | PRKD2 | NP_057541 |
| 161 | PRKDC | NP_008835 |
| 162 | PRPF38B | NP_060531 |
| 163 | PRSS23 | NP_009104 |
| 164 | PYHIN1 | NP_689714 |
| 165 | QRICH1 | NP_060200 |
| 166 | RAB32 | NP_006825 |
| 167 | RBM15 | NP_073605 |
| 168 | RBM23 | NP_060577 |
| 169 | RFC1 | NP_002904 |
| 170 | RNASE6 | NP_005606 |
| 171 | RUNX2 | NP_001015051 |
| 172 | RYK | NP_002949 |
| 173 | SAP130 | NP_078821 |
| 174 | SEMA4D | NP_006369 |
| 175 | SIDT1 | NP_060169 |
| 176 | SMPDL3A | NP_006705 |
| 177 | SPIN1 | NP_006708 |
| 178 | ST3GAL2 | NP_008858 |
| 179 | SYTL2 | NP_116561 |
| 180 | TGFBR3 | NP_003234 |
| 181 | TLE3 | NP_005069 |
| 182 | TLR5 | NP_003259 |
| 183 | TMEM165 | NP_060945 |
| 184 | TSPO | NP_000705 |
| 185 | UTRN | NP_009055 |
| 186 | YPEL1 | NP_037445 |
| 187 | ZFP36L2 | NP_008818 |
| 188 | ZHX2 | NP_055758 |

TABLE 5
VASIRS BIOMARKER DETAILS INCLUDING;
SEQUENCE IDENTIFICATION NUMBER,
GENE SYMBOL, ENSEMBL TRANSCRIPT
ID AND DNA SEQUENCE

| SEQ ID | Gene | Ensembl Transcript |
|---|---|---|
| # (DNA) | Symbol | ID |
| 189 | ABAT | ENST00000396600 |
| 190 | ABHD2 | ENST00000565973 |
| 191 | ABI1 | ENST00000376142 |
| 192 | ABLIM1 | ENST00000277895 |
| 193 | ACAA1 | ENST00000333167 |
| 194 | ACAP2 | ENST00000326793 |
| 195 | ACVR1B | ENST00000257963 |
| 196 | AIF1 | ENST00000413349 |
| 197 | ALDH3A2 | ENST00000579855 |
| 198 | ANKRD49 | ENST00000544612 |
| 199 | AOAH | ENST00000617537 |
| 200 | APBB1IP | ENST00000376236 |
| 201 | APLP2 | ENST00000263574 |
| 202 | ARAP1 | ENST00000334211 |
| 203 | ARHGAP15 | ENST00000295095 |
| 204 | ARHGAP25 | ENST00000409030 |
| 205 | ARHGAP26 | ENST00000274498 |
| 206 | ARHGEF2 | ENST00000313695 |
| 207 | ARRB1 | ENST00000420843 |
| 208 | ARRB2 | ENST00000269260 |
| 209 | ASAP1 | ENST00000518721 |
| 210 | ATAD2B | ENST00000238789 |
| 211 | ATF7IP2 | ENST00000396560 |
| 212 | ATM | ENST00000278616 |
| 213 | ATP6V1B2 | ENST00000276390 |
| 214 | BACH1 | ENST00000286800 |
| 215 | BANP | ENST00000355022 |
| 216 | BAZ2B | ENST00000392783 |
| 217 | BCL2 | ENST00000398117 |
| 218 | BEX4 | ENST00000372695 |
| 219 | BMP2K | ENST00000502871 |
| 220 | BRD1 | ENST00000216267 |
| 221 | BRD4 | ENST00000371835 |
| 222 | BTG1 | ENST00000256015 |
| 223 | C19orf66 | ENST00000253110 |
| 224 | C2orf68 | ENST00000306336 |
| 225 | CAMK1D | ENST00000378845 |
| 226 | CAMK2G | ENST00000351293 |
| 227 | CAP1 | ENST00000372797 |
| 228 | CASC3 | ENST00000264645 |
| 229 | CASP8 | ENST00000264275 |
| 230 | CBX7 | ENST00000216133 |
| 231 | CCND3 | ENST00000372991 |
| 232 | CCNG2 | ENST00000316355 |
| 233 | CCNT2 | ENST00000295238 |
| 234 | CCR7 | ENST00000246657 |
| 235 | CD37 | ENST00000323906 |
| 236 | CD93 | ENST00000246006 |
| 237 | ADGRE5 (CD97) | ENST00000358600 |
| 238 | CDIPT | ENST00000219789 |
| 239 | CEP170 | ENST00000612450 |
| 240 | CEP68 | ENST00000377990 |
| 241 | CHD3 | ENST00000358181 |
| 242 | CHMP1B | ENST00000526991 |
| 243 | CHMP7 | ENST00000397677 |
| 244 | CHST11 | ENST00000303694 |
| 245 | CIAPIN1 | ENST00000394391 |
| 246 | CLEC4A | ENST00000229332 |
| 247 | CLK4 | ENST00000316308 |
| 248 | CNPY3 | ENST00000372836 |
| 249 | CREB1 | ENST00000353267 |
| 250 | CREBBP | ENST00000262367 |
| 251 | CRLF3 | ENST00000324238 |
| 252 | CRTC3 | ENST00000268184 |
| 253 | CSAD | ENST00000267085 |
| 254 | CSF2RB | ENST00000403662 |
| 255 | CSNK1D | ENST00000314028 |
| 256 | CST3 | ENST00000376925 |
| 257 | CTBP2 | ENST00000337195 |
| 258 | CTDSP2 | ENST00000398073 |
| 259 | CUL1 | ENST00000325222 |
| 260 | CYLD | ENST00000311559 |
| 261 | CYTH4 | ENST00000248901 |
| 262 | DCP2 | ENST00000389063 |
| 263 | DDX60 | ENST00000393743 |
| 264 | DGCR2 | ENST00000263196 |
| 265 | DGKA | ENST00000331886 |
| 266 | DHX58 | ENST00000251642 |
| 267 | DIDO1 | ENST00000370371 |
| 268 | DOCK9 | ENST00000376460 |
| 269 | DOK3 | ENST00000357198 |
| 270 | DPEP2 | ENST00000393847 |
| 271 | DPF2 | ENST00000528416 |
| 272 | EIF2AK2 | ENST00000395127 |
| 273 | EIF3H | ENST00000521861 |
| 274 | EMR2 | ENST00000315576 |
| 275 | ERBB2IP | ENST00000380943 |
| 276 | ETS2 | ENST00000360938 |
| 277 | FAIM3 | ENST00000367091 |
| 278 | FAM134A | ENST00000430297 |
| 279 | FAM65B | ENST00000259698 |
| 280 | FBXO11 | ENST00000402508 |
| 281 | FBXO9 | ENST00000244426 |
| 282 | FCGRT | ENST00000426395 |
| 283 | FES | ENST00000328850 |
| 284 | FGR | ENST00000374005 |
| 285 | FLOT2 | ENST00000394908 |
| 286 | FNBP1 | ENST00000446176 |
| 287 | FOXJ2 | ENST00000162391 |
| 288 | FOXO1 | ENST00000379561 |
| 289 | FOXO3 | ENST00000406360 |
| 290 | FRY | ENST00000542859 |
| 291 | FYB | ENST00000505428 |
| 292 | GABARAP | ENST00000302386 |
| 293 | GCC2 | ENST00000309863 |
| 294 | GMIP | ENST00000203556 |
| 295 | GNA12 | ENST00000275364 |
| 296 | GNAQ | ENST00000286548 |
| 297 | GOLGA7 | ENST00000520817 |
| 298 | GPBP1L1 | ENST00000355105 |
| 299 | GPR97 | ENST00000333493 |
| 300 | GPS2 | ENST00000389167 |
| 301 | GPSM3 | ENST00000383269 |
| 302 | GRB2 | ENST00000316804 |
| 303 | GSK3B | ENST00000316626 |
| 304 | GYPC | ENST00000259254 |
| 305 | HAL | ENST00000261208 |
| 306 | HCK | ENST00000534862 |
| 307 | HERC5 | ENST00000264350 |
| 308 | HERC6 | ENST00000264346 |
| 309 | HGSNAT | ENST00000379644 |
| 310 | HHEX | ENST00000282728 |
| 311 | HIP1 | ENST00000336926 |
| 312 | HPCAL1 | ENST00000307845 |
| 313 | HPS1 | ENST00000325103 |
| 314 | ICAM3 | EN5T00000160262 |
| 315 | IFI44 | ENST00000370747 |
| 316 | IFI6 | ENST00000361157 |
| 317 | IFIH1 | ENST00000263642 |
| 318 | IGSF6 | ENST00000268389 |
| 319 | IKBKB | ENST00000520810 |
| 320 | IL10RB | ENST00000290200 |
| 321 | IL13RA1 | ENST00000371666 |
| 322 | IL16 | ENST00000394652 |
| 323 | IL1RAP | ENST00000447382 |
| 324 | IL27RA | ENST00000263379 |
| 325 | IL4R | ENST00000395762 |
| 326 | IL6R | ENST00000368485 |
| 327 | IL6ST | ENST00000381298 |
| 328 | INPP5D | ENST00000359570 |
| 329 | IQSEC1 | ENST00000273221 |
| 330 | ISG15 | ENST00000379389 |
| 331 | ITGAX | ENST00000268296 |
| 332 | ITGB2 | ENST00000302347 |
| 333 | ITPKB | ENST00000429204 |
| 334 | ITSN2 | ENST00000355123 |
| 335 | JAK1 | ENST00000342505 |
| 336 | KBTBD2 | ENST00000304056 |
| 337 | KIAA0232 | ENST00000307659 |
| 338 | KIAA0247 | ENST00000342745 |
| 339 | KIAA0513 | ENST00000258180 |
| 340 | KLF3 | ENST00000261438 |
| 341 | KLF6 | ENST00000497571 |
| 342 | KLF7 | ENST00000309446 |
| 343 | KLHL2 | ENST00000226725 |
| 344 | LAP3 | ENST00000618908 |
| 345 | LAPTM5 | ENST00000294507 |
| 346 | LAT2 | ENST00000344995 |
| 347 | LCP2 | ENST00000046794 |
| 348 | LDLRAP1 | ENST00000374338 |
| 349 | LEF1 | ENST00000265165 |
| 350 | LILRA2 | ENST00000251376 |
| 351 | LILRB3 | ENST00000617251 |
| 352 | LIMK2 | ENST00000331728 |
| 353 | LPAR2 | ENST00000407877 |
| 354 | LPIN2 | ENST00000261596 |
| 355 | LRMP | ENST00000354454 |
| 356 | LRP10 | ENST00000359591 |
| 357 | LST1 | ENST00000376093 |
| 358 | LTB | ENST00000429299 |
| 359 | LYL1 | ENST00000264824 |
| 360 | LYN | ENST00000519728 |
| 361 | LYST | ENST00000389793 |
| 362 | MAML1 | ENST00000292599 |
| 363 | MANSC1 | ENST00000535902 |
| 364 | MAP1LC3B | ENST00000268607 |
| 365 | MAP3K11 | ENST00000309100 |
| 366 | MAP3K3 | ENST00000361733 |
| 367 | MAP3K5 | ENST00000359015 |
| 368 | MAP4K4 | ENST00000350198 |
| 369 | MAPK1 | ENST00000215832 |
| 370 | MAPK14 | ENST00000229795 |
| 371 | MAPRE2 | ENST00000300249 |
| 372 | MARCH7 | ENST00000259050 |
| 373 | MARCH8 | ENST00000319836 |
| 374 | MARK3 | ENST00000303622 |
| 375 | MAST3 | ENST00000262811 |
| 376 | MAX | ENST00000358664 |
| 377 | MBP | ENST00000359645 |
| 378 | MCTP2 | ENST00000357742 |
| 379 | MED13 | ENST00000397786 |
| 380 | MEF2A | ENST00000354410 |
| 381 | METTL3 | ENST00000298717 |
| 382 | MKLN1 | ENST00000352689 |
| 383 | MKRN1 | ENST00000255977 |
| 384 | MMP25 | ENST00000336577 |
| 385 | MORC3 | ENST00000400485 |
| 386 | MOSPD2 | ENST00000380492 |
| 387 | MPPE1 | ENST00000588072 |
| 388 | MSL1 | ENST00000579565 |
| 389 | MTMR3 | ENST00000401950 |
| 390 | MX1 | ENST00000398598 |
| 391 | MXI1 | ENST00000239007 |
| 392 | MYC | ENST00000613283 |
| 393 | N4BP1 | ENST00000262384 |
| 394 | NAB1 | ENST00000337386 |
| 395 | NACA | ENST00000356769 |
| 396 | NCBP2 | ENST00000321256 |
| 397 | NCOA1 | ENST00000348332 |
| 398 | NCOA4 | ENST00000585132 |
| 399 | NDE1 | ENST00000396354 |
| 400 | NDEL1 | ENST00000334527 |
| 401 | NDFIP1 | ENST00000253814 |
| 402 | NECAP2 | ENST00000337132 |
| 403 | NEK7 | ENST00000367385 |
| 404 | NFKB1 | ENST00000226574 |
| 405 | NFYA | ENST00000341376 |
| 406 | NLRP1 | ENST00000269280 |
| 407 | NOD2 | ENST00000300589 |
| 408 | NOSIP | ENST00000596358 |
| 409 | NPL | ENST00000367553 |
| 410 | NR3C1 | ENST00000394464 |
| 411 | NRBF2 | ENST00000277746 |
| 412 | NSUN3 | ENST00000314622 |
| 413 | NUMB | ENST00000557597 |
| 414 | OAS2 | ENST00000392583 |
| 415 | OASL | ENST00000257570 |
| 416 | OGFRL1 | ENST00000370435 |
| 417 | OSBPL11 | ENST00000296220 |
| 418 | OSBPL2 | ENST00000358053 |
| 419 | PACSIN2 | ENST00000403744 |
| 420 | PAFAH1B1 | ENST00000397195 |
| 421 | PARP12 | ENST00000263549 |
| 422 | PBX3 | ENST00000373489 |
| 423 | PCBP2 | ENST00000359462 |
| 424 | PCF11 | ENST00000298281 |
| 425 | PCNX | ENST00000304743 |
| 426 | PDCD6IP | ENST00000307296 |
| 427 | PDE3B | ENST00000282096 |
| 428 | PECAM1 | ENST00000563924 |
| 429 | PFDN5 | ENST00000551018 |
| 430 | PGS1 | ENST00000262764 |
| 431 | PHC2 | ENST00000373418 |
| 432 | PHF11 | ENST00000378319 |
| 433 | PHF2 | ENST00000359246 |
| 434 | PHF20 | ENST00000374012 |
| 435 | PHF20L1 | ENST00000395386 |
| 436 | PHF3 | ENST00000393387 |
| 437 | PIAS1 | ENST00000249636 |
| 438 | PIK3IP1 | ENST00000215912 |
| 439 | PINK1 | ENST00000321556 |
| 440 | PISD | ENST00000266095 |
| 441 | PITPNA | ENST00000313486 |
| 442 | PLEKHO1 | ENST00000369124 |
| 443 | PLEKHO2 | ENST00000323544 |
| 444 | PLXNC1 | ENST00000258526 |
| 445 | POLB | ENST00000265421 |
| 446 | POLD4 | ENST00000312419 |
| 447 | POLR1D | ENST00000302979 |
| 448 | PPARD | ENST00000360694 |
| 449 | PPM1F | ENST00000263212 |
| 450 | PPP1R11 | ENST00000448378 |
| 451 | PPP1R2 | ENST00000618156 |
| 452 | PPP2R5A | ENST00000261461 |
| 453 | PPP3R1 | ENST00000234310 |
| 454 | PPP4R1 | ENST00000400555 |
| 455 | PRKAA1 | ENST00000397128 |
| 456 | PRKAG2 | ENST00000287878 |
| 457 | PRKCD | ENST00000330452 |
| 458 | PRMT2 | ENST00000397638 |
| 459 | PRUNE | ENST00000271620 |
| 460 | PSAP | ENST00000394936 |
| 461 | PSEN1 | ENST00000324501 |
| 462 | PSTPIP1 | ENST00000558012 |
| 463 | PTAFR | ENST00000373857 |
| 464 | PTEN | ENST00000371953 |
| 465 | PTGER4 | ENST00000302472 |
| 466 | PTPN6 | ENST00000318974 |
| 467 | PTPRE | ENST00000254667 |
| 468 | PUM2 | ENST00000338086 |
| 469 | R3HDM2 | ENST00000358907 |
| 470 | RAB11FIP1 | ENST00000287263 |
| 471 | RAB14 | ENST00000373840 |
| 472 | RAB31 | ENST00000578921 |
| 473 | RAB4B | ENST00000357052 |
| 474 | RAB7A | ENST00000265062 |
| 475 | RAF1 | ENST00000251849 |
| 476 | RALB | ENST00000272519 |
| 477 | RARA | ENST00000254066 |
| 478 | RASSF2 | ENST00000379400 |
| 479 | RBM23 | ENST00000399922 |
| 480 | RBMS1 | ENST00000348849 |
| 481 | RC3H2 | ENST00000423239 |
| 482 | RERE | ENST00000337907 |
| 483 | RGS14 | ENST00000408923 |
| 484 | RGS19 | ENST00000395042 |
| 485 | RHOG | ENST00000351018 |
| 486 | RIN3 | ENST00000216487 |
| 487 | RNASET2 | ENST00000508775 |
| 488 | RNF130 | EN5T00000521389 |
| 489 | RNF141 | ENST00000265981 |
| 490 | RNF146 | ENST00000608991 |
| 491 | RNF19B | ENST00000373456 |
| 492 | RPL10A | ENST00000322203 |
| 493 | RPL22 | ENST00000234875 |
| 494 | RPS6KA1 | ENST00000374168 |
| 495 | RPS6KA3 | ENST00000379565 |
| 496 | RSAD2 | ENST00000382040 |
| 497 | RTN3 | ENST00000537981 |
| 498 | RTP4 | ENST00000259030 |
| 499 | RXRA | ENST00000481739 |
| 500 | RYBP | ENST00000477973 |
| 501 | SAFB2 | ENST00000252542 |
| 502 | SATB1 | ENST00000338745 |
| 503 | SEC62 | ENST00000337002 |
| 504 | SEMA4D | ENST00000438547 |
| 505 | SERINC3 | ENST00000342374 |
| 506 | SERINC5 | ENST00000509193 |
| 507 | SERTAD2 | ENST00000313349 |
| 508 | SESN1 | ENST00000436639 |
| 509 | SETD2 | ENST00000409792 |
| 510 | SH2B3 | ENST00000341259 |
| 511 | SH2D3C | ENST00000373277 |
| 512 | SIRPA | ENST00000356025 |
| 513 | SIRPB1 | ENST00000381605 |
| 514 | SLCO3A1 | ENST00000318445 |
| 515 | SMAD4 | ENST00000342988 |
| 516 | SNN | ENST00000329565 |
| 517 | SNRK | ENST00000296088 |
| 518 | SNX27 | ENST00000368843 |
| 519 | SOATI | ENST00000367619 |
| 520 | SORL1 | ENST00000260197 |
| 521 | SOS2 | ENST00000216373 |
| 522 | SP3 | ENST00000310015 |
| 523 | SSBP2 | ENST00000320672 |
| 524 | SSFA2 | ENST00000320370 |
| 525 | ST13 | ENST00000216218 |
| 526 | ST3GAL1 | ENST00000521180 |
| 527 | STAM2 | ENST00000263904 |
| 528 | STAT1 | ENST00000361099 |
| 529 | STAT5A | ENST00000345506 |
| 530 | STAT5B | ENST00000293328 |
| 531 | STK38L | ENST00000389032 |
| 532 | STX10 | ENST00000587230 |
| 533 | STX3 | ENST00000337979 |
| 534 | STX6 | ENST00000258301 |
| 535 | SYPL1 | ENST00000011473 |
| 536 | TAP1 | ENST00000428324 |
| 537 | TFE3 | ENST00000315869 |
| 538 | TFEB | ENST00000230323 |
| 539 | TGFBI | ENST00000442011 |
| 540 | TGFBR2 | ENST00000295754 |
| 541 | TGOLN2 | ENST00000377386 |
| 542 | TIAM1 | ENST00000286827 |
| 543 | TLE3 | ENST00000558939 |
| 544 | TLE4 | ENST00000376552 |
| 545 | TLR2 | ENST00000260010 |
| 546 | TM2D3 | ENST00000347970 |
| 547 | TMBIM1 | ENST00000258412 |
| 548 | TMEM127 | ENST00000258439 |
| 549 | TMEM204 | ENST00000566264 |
| 550 | TNFRSF1A | ENST00000162749 |
| 551 | TNFSF13 | ENST00000338784 |
| 552 | TNIP1 | ENST00000521591 |
| 553 | TNK2 | ENST00000333602 |
| 554 | TNRC6B | ENST00000335727 |
| 555 | TOPORS | ENST00000360538 |
| 556 | TRAK1 | ENST00000341421 |
| 557 | TREM1 | ENST00000244709 |
| 558 | TRIB2 | ENST00000155926 |
| 559 | TRIM8 | ENST00000302424 |
| 560 | TRIOBP | ENST00000403663 |
| 561 | TSC22D3 | ENST00000372397 |
| 562 | TYK2 | ENST00000525621 |
| 563 | TYROBP | ENST00000262629 |
| 564 | UBE2D2 | ENST00000398733 |
| 565 | UBE2L6 | ENST00000287156 |
| 566 | UBN1 | ENST00000262376 |
| 567 | UBQLN2 | ENST00000338222 |
| 568 | UBXN2B | ENST00000399598 |
| 569 | USP10 | ENST00000219473 |
| 570 | USP15 | ENST00000353364 |
| 571 | USP18 | ENST00000215794 |
| 572 | USP4 | ENST00000265560 |
| 573 | UTP14A | ENST00000394422 |
| 574 | VAMP3 | ENST00000054666 |
| 575 | VAV3 | EN5T00000370056 |
| 576 | VEZF1 | ENST00000581208 |
| 577 | VPS8 | ENST00000436792 |
| 578 | WASF2 | ENST00000618852 |
| 579 | WBP2 | ENST00000254806 |
| 580 | WDR37 | ENST00000263150 |
| 581 | WDR47 | ENST00000369965 |
| 582 | XAF1 | ENST00000361842 |
| 583 | XPC | ENST00000285021 |
| 584 | XPO6 | ENST00000304658 |
| 585 | YPEL5 | ENST00000261353 |
| 586 | YTHDF3 | ENST00000539294 |
| 588 | ZBTB18 | ENST00000622512 |
| 589 | ZC3HAV1 | ENST00000242351 |
| 590 | ZDHHC17 | ENST00000426126 |
| 591 | ZDHHC18 | ENST00000374142 |
| 592 | ZFAND5 | ENST00000376960 |
| 593 | ZFC3H1 | ENST00000378743 |
| 594 | ZFYVE16 | ENST00000338008 |
| 595 | ZMIZ1 | ENST00000334512 |
| 596 | ZNF143 | ENST00000396602 |
| 597 | ZNF148 | ENST00000360647 |
| 598 | ZNF274 | ENST00000424679 |
| 599 | ZNF292 | ENST00000369577 |
| 600 | ZXDC | ENST00000389709 |
| 601 | ZYX | ENST00000322764 |

TABLE 6
VASIRS BIOMARKER DETAILS INCLUDING;
SEQUENCE IDENTIFICATION NUMBER,
GENE SYMBOL, GENBANK ACCESSION
AND AMINO ACID SEQUENCE

| SEQ ID | Gene | GenBank |
|---|---|---|
| # (AA) | Symbol | Accession |
| 602 | ABAT | NP_000654 |
| 603 | ABHD2 | NP_008942 |
| 604 | ABI1 | NP_005461 |
| 605 | ABLIM1 | NP_002304 |
| 606 | ACAA1 | NP_001598 |
| 607 | ACAP2 | NP_036419 |
| 608 | ACVR1B | NP_004293 |
| 609 | AIF1 | NP_001614 |
| 610 | ALDH3A2 | NP_000373 |
| 611 | ANKRD49 | NP_060174 |
| 612 | AOAH | NP_001628 |
| 613 | APBB1IP | NP_061916 |
| 614 | APLP2 | NP_001633 |
| 615 | ARAP1 | NP_056057 |
| 616 | ARHGAP15 | NP_060930 |
| 617 | ARHGAP25 | NP_055697 |
| 618 | ARHGAP26 | NP_055886 |
| 619 | ARHGEF2 | NP_004714 |
| 620 | ARRB1 | NP_004032 |
| 621 | ARRB2 | NP_004304 |
| 622 | ASAP1 | NP_060952 |
| 623 | ATAD2B | NP_060022 |
| 624 | ATF7IP2 | NP_079273 |
| 625 | ATM | NP_000042 |
| 626 | ATP6V1B2 | NP_001684 |
| 627 | BACH1 | NP_001177 |
| 628 | BANP | NP_060339 |
| 629 | BAZ2B | NP_038478 |
| 630 | BCL2 | NP_000624 |
| 631 | BEX4 | NP_001073894 |
| 632 | BMP2K | NP_060063 |
| 633 | BRD1 | NP_055392 |
| 634 | BRD4 | NP_055114 |
| 635 | BTG1 | NP_001722 |
| 636 | C19orf66 | NP_060851 |
| 637 | C2orf68 | NP_001013671 |
| 638 | CAMK1D | NP_065130 |
| 639 | CAMK2G | NP_001213 |
| 640 | CAP1 | NP_006358 |
| 641 | CASC3 | NP_031385 |
| 642 | CASP8 | NP_001219 |
| 643 | CBX7 | NP_783640 |
| 644 | CCND3 | NP_001751 |
| 645 | CCNG2 | NP_004345 |
| 646 | CCNT2 | NP_001232 |
| 647 | CCR7 | NP_001829 |
| 648 | CD37 | NP_001765 |
| 649 | CD93 | NP_036204 |
| 650 | ADGRE5 (CD97) | NP_001775 |
| 651 | CDIPT | NP_006310 |
| 652 | CEP170 | NP_055627 |
| 653 | CEP68 | NP_055962 |
| 654 | CHD3 | NP_005843 |
| 655 | CHMP1B | NP_065145 |
| 656 | CHMP7 | NP_689485 |
| 657 | CHST11 | NP_060883 |
| 658 | CIAPIN1 | NP_064709 |
| 659 | CLEC4A | NP_057268 |
| 660 | CLK4 | NP_065717 |
| 661 | CNPY3 | NP_006577 |
| 662 | CREB1 | NP_004370 |
| 663 | CREBBP | NP_004371 |
| 664 | CRLF3 | NP_057070 |
| 665 | CRTC3 | NP_073606 |
| 666 | CSAD | NP_057073 |
| 667 | CSF2RB | NP_000386 |
| 668 | CSNK1D | NP_001884 |
| 669 | CST3 | NP_000090 |
| 670 | CTBP2 | NP_001320 |
| 671 | CTDSP2 | NP_005721 |
| 672 | CUL1 | NP_003583 |
| 673 | CYLD | NP_056062 |
| 674 | CYTH4 | NP_037517 |
| 675 | DCP2 | NP_689837 |
| 676 | DDX60 | NP_060101 |
| 677 | DGCR2 | NP_005128 |
| 678 | DGKA | NP_001336 |
| 679 | DHX58 | NP_077024 |
| 680 | DIDO1 | NP_071388 |
| 681 | DOCK9 | NP_056111 |
| 682 | DOK3 | NP_079148 |
| 683 | DPEP2 | NP_071750 |
| 684 | DPF2 | NP_006259 |
| 685 | EIF2AK2 | NP_002750 |
| 686 | EIF3H | NP_003747 |
| 687 | EMR2 | NP_038475 |
| 688 | ERBB2IP | NP_061165 |
| 689 | ETS2 | NP_005230 |
| 690 | FAIM3 | NP_005440 |
| 691 | FAM134A | NP_077269 |
| 692 | FAM65B | NP_055537 |
| 693 | FBXO11 | NP_079409 |
| 694 | FBXO9 | NP_036479 |
| 695 | FCGRT | NP_004098 |
| 696 | FES | NP_001996 |
| 697 | FGR | NP_005239 |
| 698 | FLOT2 | NP_004466 |
| 699 | FNBP1 | NP_055848 |
| 700 | FOXJ2 | NP_060886 |
| 701 | FOXO1 | NP_002006 |
| 702 | FOXO3 | NP_001446 |
| 703 | FRY | NP_075463 |
| 704 | FYB | NP_001456 |
| 705 | GABARAP | NP_009209 |
| 706 | GCC2 | NP_852118 |
| 707 | GMIP | NP_057657 |
| 708 | GNA12 | NP_031379 |
| 709 | GNAQ | NP_002063 |
| 710 | GOLGA7 | NP_057183 |
| 711 | GPBP1L1 | NP_067652 |
| 712 | GPR97 | NP_740746 |
| 713 | GPS2 | NP_004480 |
| 714 | GPSM3 | NP_071390 |
| 715 | GRB2 | NP_002077 |
| 716 | GSK3B | NP_002084 |
| 717 | GYPC | NP_002092 |
| 718 | HAL | NP_002099 |
| 719 | HCK | NP_002101 |
| 720 | HERC5 | NP_057407 |
| 721 | HERC6 | NP_060382 |
| 722 | HGSNAT | NP_689632 |
| 723 | HHEX | NP_002720 |
| 724 | HIP1 | NP_005329 |
| 725 | HPCAL1 | NP_002140 |
| 726 | HPS1 | NP_000186 |
| 727 | ICAM3 | NP_002153 |
| 728 | IFI44 | NP_006408 |
| 729 | IFI6 | NP_002029 |
| 730 | IFIH1 | NP_071451 |
| 731 | IGSF6 | NP_005840 |
| 732 | IKBKB | NP_001547 |
| 733 | IL10RB | NP_000619 |
| 734 | IL13RA1 | NP_001551 |
| 735 | IL16 | NP_004504 |
| 736 | IL1RAP | NP_002173 |
| 737 | IL27RA | NP_004834 |
| 738 | IL4R | NP_000409 |
| 739 | IL6R | NP_000556 |
| 740 | IL6ST | NP_002175 |
| 741 | INPP5D | NP_005532 |
| 742 | IQSEC1 | NP_055684 |
| 743 | ISG15 | NP_005092 |
| 744 | ITGAX | NP_000878 |
| 745 | ITGB2 | NP_000202 |
| 746 | ITPKB | NP_002212 |
| 747 | ITSN2 | NP_006268 |
| 748 | JAK1 | NP_002218 |
| 749 | KBTBD2 | NP_056298 |
| 750 | KIAA0232 | NP_055558 |
| 751 | KIAA0247 | NP_055549 |
| 752 | KIAA0513 | NP_055547 |
| 753 | KLF3 | NP_057615 |
| 754 | KLF6 | NP_001291 |
| 755 | KLF7 | NP_003700 |
| 756 | KLHL2 | NP_009177 |
| 757 | LAP3 | NP_056991 |
| 758 | LAPTM5 | NP_006753 |
| 759 | LAT2 | NP_054865 |
| 760 | LCP2 | NP_005556 |
| 761 | LDLRAP1 | NP_056442 |
| 762 | LEF1 | NP_057353 |
| 763 | LILRA2 | NP_006857 |
| 764 | LILRB3 | NP_006855 |
| 765 | LIMK2 | NP_005560 |
| 766 | LPAR2 | NP_004711 |
| 767 | LPIN2 | NP_055461 |
| 768 | LRMP | NP_006143 |
| 769 | LRP10 | NP_054764 |
| 770 | LST1 | NP_009092 |
| 771 | LTB | NP_002332 |
| 772 | LYL1 | NP_005574 |
| 773 | LYN | NP_002341 |
| 774 | LYST | NP_000072 |
| 775 | MAML1 | NP_055572 |
| 776 | MANSC1 | NP_060520 |
| 777 | MAP1LC3B | NP_073729 |
| 778 | MAP3K11 | NP_002410 |
| 779 | MAP3K3 | NP_002392 |
| 780 | MAP3K5 | NP_005914 |
| 781 | MAP4K4 | NP_004825 |
| 782 | MAPK1 | NP_002736 |
| 783 | MAPK14 | NP_001306 |
| 784 | MAPRE2 | NP_055083 |
| 785 | MARCH7 | NP_073737 |
| 786 | MARCH8 | NP_659458 |
| 787 | MARK3 | NP_002367 |
| 788 | MAST3 | NP_055831 |
| 789 | MAX | NP_002373 |
| 790 | MBP | NP_002376 |
| 791 | MCTP2 | NP_060819 |
| 792 | MED13 | NP_005112 |
| 793 | MEF2A | NP_005578 |
| 794 | METTL3 | NP_062826 |
| 795 | MKLN1 | NP_037387 |
| 796 | MKRN1 | NP_038474 |
| 797 | MMP25 | NP_071913 |
| 798 | MORC3 | NP_056173 |
| 799 | MOSPD2 | NP_689794 |
| 800 | MPPE1 | NP_075563 |
| 801 | MSL1 | NP_001012241 |
| 802 | MTMR3 | NP_066576 |
| 803 | MX1 | NP_002453 |
| 804 | MXI1 | NP_005953 |
| 805 | MYC | NP_002458 |
| 806 | N4BP1 | NP_694574 |
| 807 | NAB1 | NP_005957 |
| 808 | NACA | NP_001106673 |
| 809 | NCBP2 | NP_031388 |
| 810 | NCOA1 | NP_003734 |
| 811 | NCOA4 | NP_005428 |
| 812 | NDE1 | NP_060138 |
| 813 | NDEL1 | NP_110435 |
| 814 | NDFIP1 | NP_085048 |
| 815 | NECAP2 | NP_060560 |
| 816 | NEK7 | NP_598001 |
| 817 | NFKB1 | NP_003989 |
| 818 | NFYA | NP_002496 |
| 819 | NLRP1 | NP_055737 |
| 820 | NOD2 | NP_071445 |
| 821 | NOSIP | NP_057037 |
| 822 | NPL | NP_110396 |
| 823 | NR3C1 | NP_000167 |
| 824 | NRBF2 | NP_110386 |
| 825 | NSUN3 | NP_071355 |
| 826 | NUMB | NP_003735 |
| 827 | OAS2 | NP_002526 |
| 828 | OASL | NP_003724 |
| 829 | OGFRL1 | NP_078852 |
| 830 | OSBPL11 | NP_073613 |
| 831 | OSBPL2 | NP_055650 |
| 832 | PACSIN2 | NP_009160 |
| 833 | PAFAH1B1 | NP_000421 |
| 834 | PARP12 | NP_073587 |
| 835 | PBX3 | NP_006186 |
| 836 | PCBP2 | NP_005007 |
| 837 | PCF11 | NP_056969 |
| 838 | PCNX | NP_055797 |
| 839 | PDCD6IP | NP_037506 |
| 840 | PDE3B | NP_000913 |
| 841 | PECAM1 | NP_000433 |
| 842 | PFDN5 | NP_002615 |
| 843 | PGS1 | NP_077733 |
| 844 | PHC2 | NP_004418 |
| 845 | PHF11 | NP_001035533 |
| 846 | PHF2 | NP_005383 |
| 847 | PHF20 | NP_057520 |
| 848 | PHF20L1 | NP_057102 |
| 849 | PHF3 | NP_055968 |
| 850 | PIAS1 | NP_057250 |
| 851 | PIK3IP1 | NP_443112 |
| 852 | PINK1 | NP_115785 |
| 853 | PISD | NP_055153 |
| 854 | PITPNA | NP_006215 |
| 855 | PLEKHO1 | NP_057358 |
| 856 | PLEKHO2 | NP_079477 |
| 857 | PLXNC1 | NP_005752 |
| 858 | POLB | NP_002681 |
| 859 | POLD4 | NP_066996 |
| 860 | POLR1D | NP_057056 |
| 861 | PPARD | NP_006229 |
| 862 | PPM1F | NP_055449 |
| 863 | PPP1R11 | NP_068778 |
| 864 | PPP1R2 | NP_006232 |
| 865 | PPP2R5A | NP_006234 |
| 866 | PPP3R1 | NP_000936 |
| 867 | PPP4R1 | NP_005125 |
| 868 | PRKAA1 | NP_006242 |
| 869 | PRKAG2 | NP_057287 |
| 870 | PRKCD | NP_006245 |
| 871 | PRMT2 | NP_001526 |
| 872 | PRUNE | NP_067045 |
| 873 | PSAP | NP_002769 |
| 874 | PSEN1 | NP_000012 |
| 875 | PSTPIP1 | NP_003969 |
| 876 | PTAFR | NP_000943 |
| 877 | PTEN | NP_000305 |
| 878 | PTGER4 | NP_000949 |
| 879 | PTPN6 | NP_002822 |
| 880 | PTPRE | NP_006495 |
| 881 | PUM2 | NP_056132 |
| 882 | R3HDM2 | NP_055740 |
| 883 | RAB11FIP1 | NP_079427 |
| 884 | RAB14 | NP_057406 |
| 885 | RAB31 | NP_006859 |
| 886 | RAB4B | NP_057238 |
| 887 | RAB7A | NP_004628 |
| 888 | RAF1 | NP_002871 |
| 889 | RALB | NP_002872 |
| 890 | RARA | NP_000955 |
| 891 | RASSF2 | NP_055552 |
| 892 | RBM23 | NP_060577 |
| 893 | RBMS1 | NP_002888 |
| 894 | RC3H2 | NP_061323 |
| 895 | RERE | NP_036234 |
| 896 | RGS14 | NP_006471 |
| 897 | RGS19 | NP_005864 |
| 898 | RHOG | NP_001656 |
| 899 | RIN3 | NP_079108 |
| 900 | RNASET2 | NP_003721 |
| 901 | RNF130 | NP_060904 |
| 902 | RNF141 | NP_057506 |
| 903 | RNF146 | NP_112225 |
| 904 | RNF19B | NP_699172 |
| 905 | RPL10A | NP_009035 |
| 906 | RPL22 | NP_000974 |
| 907 | RPS6KA1 | NP_002944 |
| 908 | RPS6KA3 | NP_004577 |
| 909 | RSAD2 | NP_542388 |
| 910 | RTN3 | NP_006045 |
| 911 | RTP4 | NP_071430 |
| 912 | RXRA | NP_002948 |
| 913 | RYBP | NP_036366 |
| 914 | SAFB2 | NP_055464 |
| 915 | SATB1 | NP_002962 |
| 916 | SEC62 | NP_003253 |
| 917 | SEMA4D | NP_006369 |
| 918 | SERINC3 | NP_006802 |
| 919 | SERINC5 | NP_840060 |
| 920 | SERTAD2 | NP_055570 |
| 921 | SESN1 | NP_055269 |
| 922 | SETD2 | NP_054878 |
| 923 | SH2B3 | NP_005466 |
| 924 | SH2D3C | NP_005480 |
| 925 | SIRPA | NP_542970 |
| 926 | SIRPB1 | NP_006056 |
| 927 | SLCO3A1 | NP_037404 |
| 928 | SMAD4 | NP_005350 |
| 929 | SNN | NP_003489 |
| 930 | SNRK | NP_060189 |
| 931 | SNX27 | NP_112180 |
| 932 | SOAT1 | NP_003092 |
| 933 | SORL1 | NP_003096 |
| 934 | SOS2 | NP_008870 |
| 935 | SP3 | NP_003102 |
| 936 | SSBP2 | NP_036578 |
| 937 | SSFA2 | NP_006742 |
| 938 | ST13 | NP_003923 |
| 939 | ST3GAL1 | NP_003024 |
| 940 | STAM2 | NP_005834 |
| 941 | STAT1 | NP_009330 |
| 942 | STAT5A | NP_003143 |
| 943 | STAT5B | NP_036580 |
| 944 | STK38L | NP_055815 |
| 945 | STX10 | NP_003756 |
| 946 | STX3 | NP_004168 |
| 947 | STX6 | NP_005810 |
| 948 | SYPL1 | NP_006745 |
| 949 | TAP1 | NP_000584 |
| 950 | TFE3 | NP_006512 |
| 951 | TFEB | NP_009093 |
| 952 | TGFBI | NP_000349 |
| 953 | TGFBR2 | NP_003233 |
| 954 | TGOLN2 | NP_006455 |
| 955 | TIAM1 | NP_003244 |
| 956 | TLE3 | NP_005069 |
| 957 | TLE4 | NP_008936 |
| 958 | TLR2 | NP_003255 |
| 959 | TM2D3 | NP_079417 |
| 960 | TMBIM1 | NP_071435 |
| 961 | TMEM127 | NP_060319 |
| 962 | TMEM204 | NP_078876 |
| 963 | TNFRSF1A | NP_001056 |
| 964 | TNFSF13 | NP_003799 |
| 965 | TNIP1 | NP_006049 |
| 966 | TNK2 | NP_005772 |
| 967 | TNRC6B | NP_055903 |
| 968 | TOPORS | NP_005793 |
| 969 | TRAK1 | NP_055780 |
| 970 | TREM1 | NP_061113 |
| 971 | TRIB2 | NP_067675 |
| 972 | TRIM8 | NP_112174 |
| 973 | TRIOBP | NP_008963 |
| 974 | TSC22D3 | NP_004080 |
| 975 | TYK2 | NP_003322 |
| 976 | TYROBP | NP_003323 |
| 977 | UBE2D2 | NP_003330 |
| 978 | UBE2L6 | NP_004214 |
| 979 | UBN1 | NP_001072982 |
| 980 | UBQLN2 | NP_038472 |
| 981 | UBXN2B | NP_001071087 |
| 982 | USP10 | NP_005144 |
| 983 | USP15 | NP_006304 |
| 984 | USP18 | NP_059110 |
| 985 | USP4 | NP_003354 |
| 986 | UTP14A | NP_006640 |
| 987 | VAMP3 | NP_004772 |
| 988 | VAV3 | NP_006104 |
| 989 | VEZF1 | NP_009077 |
| 990 | VPS8 | NP_056118 |
| 991 | WASF2 | NP_008921 |
| 992 | WBP2 | NP_036610 |
| 993 | WDR37 | NP_054742 |
| 994 | WDR47 | NP_055784 |
| 995 | XAF1 | NP_059993 |
| 996 | XPC | NP_004619 |
| 997 | XPO6 | NP_055986 |
| 998 | YPEL5 | NP_057145 |
| 999 | YTHDF3 | NP_689971 |
| 1000 | ZBTB18 | NP_006343 |
| 1001 | ZC3HAV1 | NP_064504 |
| 1002 | ZDHHC17 | NP_056151 |
| 1003 | ZDHHC18 | NP_115659 |
| 1004 | ZFAND5 | NP_005998 |
| 1005 | ZFC3H1 | NP_659419 |
| 1006 | ZFYVE16 | NP_055548 |
| 1007 | ZMIZ1 | NP_065071 |
| 1008 | ZNF143 | NP_003433 |
| 1009 | ZNF148 | NP_068799 |
| 1010 | ZNF274 | NP_057408 |
| 1011 | ZNF292 | NP_055836 |
| 1012 | ZXDC | NP_079388 |
| 1013 | ZVX | NP_003452 |

TABLE 7
PASIRS BIOMARKER DETAILS
INCLUDING; SEQUENCE IDENTIFICATION
NUMBER, GENE SYMBOL, ENSEMBL
TRANSCRIPT ID AND DNA SEQUENCE

| Seq ID | Gene | Ensembl Transcript |
|---|---|---|
| # DNA | Symbol | ID |
| 1014 | ACSL4 | ENST00000348502 |
| 1015 | ADK | ENST00000372734 |
| 1016 | ADSL | ENST00000623063 |
| 1017 | AHCTF1 | ENST00000326225 |
| 1018 | APEX1 | ENST00000216714 |
| 1019 | ARHGAP17 | ENST00000303665 |
| 1020 | ARID1A | ENST00000324856 |
| 1021 | ARIH2 | ENST00000356401 |
| 1022 | ASXL2 | ENST00000435504 |
| 1023 | ATOX1 | ENST00000313115 |
| 1024 | ATP2A2 | ENST00000308664 |
| 1025 | ATP6V1B2 | ENST00000276390 |
| 1026 | BCL11A | ENST00000356842 |
| 1027 | BCL3 | ENST00000164227 |
| 1028 | BCL6 | ENST00000406870 |
| 1029 | C3AR1 | ENST00000307637 |
| 1030 | CAMK2G | ENST00000351293 |
| 1031 | CCND3 | ENST00000372991 |
| 1032 | CCR7 | ENST00000246657 |
| 1033 | CD52 | ENST00000374213 |
| 1034 | CD55 | ENST00000367064 |
| 1035 | CD63 | ENST00000257857 |
| 1036 | CEBPB | ENST00000303004 |
| 1037 | CEP192 | ENST00000506447 |
| 1038 | CHN2 | ENST00000222792 |
| 1039 | CLIP4 | ENST00000320081 |
| 1040 | CNOT7 | ENST00000361272 |
| 1041 | CSNK1G2 | ENST00000255641 |
| 1042 | CSTB | ENST00000291568 |
| 1043 | DNAJC10 | ENST00000264065 |
| 1044 | ENO1 | ENST00000234590 |
| 1045 | ERLIN1 | ENST00000421367 |
| 1046 | ETV6 | ENST00000396373 |
| 1047 | EXOSC10 | ENST00000304457 |
| 1048 | EXOSC2 | ENST00000372358 |
| 1049 | EXOSC9 | ENST00000243498 |
| 1050 | FBL | ENST00000221801 |
| 1051 | FBXO11 | ENST00000402508 |
| 1052 | FCER1G | ENST00000289902 |
| 1053 | FGR | ENST00000374005 |
| 1054 | FLII | ENST00000327031 |
| 1055 | FLOT1 | ENST00000383382 |
| 1056 | FNTA | ENST00000302279 |
| 1057 | G6PD | ENST00000393562 |
| 1058 | GLG1 | ENST00000205061 |
| 1059 | GNG5 | ENST00000370645 |
| 1060 | GPI | ENST00000356487 |
| 1061 | GRINA | ENST00000313269 |
| 1062 | HCK | ENST00000534862 |
| 1063 | HERC6 | ENST00000264346 |
| 1064 | HLA-DPA1 | ENST00000383224 |
| 1065 | IL10RA | ENST00000227752 |
| 1066 | IMP3 | ENST00000403490 |
| 1067 | IRF1 | ENST00000245414 |
| 1068 | IRF8 | ENST00000268638 |
| 1069 | JUNB | ENST00000302754 |
| 1070 | KIF1B | ENST00000263934 |
| 1071 | LAP3 | ENST00000618908 |
| 1072 | LDHA | ENST00000422447 |
| 1073 | LY9 | ENST00000263285 |
| 1074 | METAP1 | ENST00000296411 |
| 1075 | MGEA5 | ENST00000361464 |
| 1076 | MLLT10 | ENST00000377072 |
| 1077 | MYD88 | ENST00000396334 |
| 1078 | NFIL3 | ENST00000297689 |
| 1079 | NFKBIA | ENST00000216797 |
| 1080 | NOSIP | ENST00000596358 |
| 1081 | NUMB | ENST00000557597 |
| 1082 | NUP160 | ENST00000378460 |
| 1083 | PCBP1 | ENST00000303577 |
| 1084 | PCID2 | ENST00000375479 |
| 1085 | PCMT1 | ENST00000464889 |
| 1086 | PGD | ENST00000270776 |
| 1087 | PLAUR | ENST00000340093 |
| 1088 | PLSCR1 | ENST00000342435 |
| 1089 | POMP | ENST00000380842 |
| 1090 | PREPL | ENST00000260648 |
| 1091 | PRKCD | ENST00000330452 |
| 1092 | RAB27A | ENST00000396307 |
| 1093 | RAB7A | ENST00000265062 |
| 1094 | RALB | ENST00000272519 |
| 1095 | RBMS1 | ENST00000348849 |
| 1096 | RIT1 | ENST00000368323 |
| 1097 | RPL15 | ENST00000611050 |
| 1098 | RPL22 | ENST00000234875 |
| 1099 | RPL9 | ENST00000295955 |
| 1100 | RPS14 | ENST00000407193 |
| 1101 | RP54X | ENST00000316084 |
| 1102 | RTN4 | ENST00000394609 |
| 1103 | SEH1L | ENST00000262124 |
| 1104 | SERBP1 | ENST00000370994 |
| 1105 | SERPINB1 | ENST00000380739 |
| 1106 | SERTAD2 | ENST00000313349 |
| 1107 | SETX | ENST00000224140 |
| 1108 | SH3GLB1 | ENST00000370558 |
| 1109 | SLAMF7 | ENST00000368043 |
| 1110 | SOCS3 | ENST00000330871 |
| 1111 | SORT1 | ENST00000256637 |
| 1112 | SPI1 | ENST00000378538 |
| 1113 | SQRDL | ENST00000260324 |
| 1114 | STAT3 | ENST00000404395 |
| 1115 | SUCLG2 | ENST00000307227 |
| 1116 | TANK | ENST00000259075 |
| 1117 | TAPI | ENST00000424897 |
| 1118 | TCF4 | ENST00000356073 |
| 1119 | TCIRG1 | ENST00000265686 |
| 1120 | TIMP2 | ENST00000262768 |
| 1121 | TMEM106B | ENST00000396667 |
| 1122 | TMEM50B | ENST00000573374 |
| 1123 | TNIP1 | ENST00000521591 |
| 1124 | TOP2B | ENST00000435706 |
| 1125 | TPP1 | ENST00000299427 |
| 1126 | TRAF3IP3 | ENST00000367025 |
| 1127 | TRIB1 | ENST00000311922 |
| 1128 | TRIT1 | ENST00000316891 |
| 1129 | TROVE2 | ENST00000367446 |
| 1130 | TRPC4AP | ENST00000252015 |
| 1131 | TSPO | ENST00000337554 |
| 1132 | TTC17 | ENST00000039989 |
| 1133 | TUBA1B | ENST00000336023 |
| 1134 | UBE2L6 | ENST00000287156 |
| 1135 | UFM1 | ENST00000239878 |
| 1136 | UPP1 | ENST00000395564 |
| 1137 | USP34 | ENST00000398571 |
| 1138 | VAMP3 | ENST00000054666 |
| 1139 | WARS | ENST00000392882 |
| 1140 | WAS | ENST00000376701 |
| 1141 | ZBED5 | ENST00000432999 |
| 1142 | ZMYND11 | ENST00000397962 |
| 1143 | ZNF266 | ENST00000590306 |

TABLE 8
PASIRS BIOMARKER DETAILS
INCLUDING; SEQUENCE IDENTIFICATION
NUMBER, GENE SYMBOL, GENBANK
ACCESSION AND AMINO ACID SEQUENCE

| Seq ID | Gene | GenBank |
|---|---|---|
| # AA | Symbol | Accession |
| 1144 | ACSL4 | NP_004449 |
| 1145 | ADK | NP_001114 |
| 1146 | ADSL | NP_000017 |
| 1147 | AHCTF1 | NP_056261 |
| 1148 | APEX1 | NP_001632 |
| 1149 | ARHGAP17 | NP_060524 |
| 1150 | ARID1A | NP_006006 |
| 1151 | ARIH2 | NP_006312 |
| 1152 | ASXL2 | NP_060733 |
| 1153 | ATOX1 | NP_004036 |
| 1154 | ATP2A2 | NP_001672 |
| 1155 | ATP6V1B2 | NP_001684 |
| 1156 | BCL11A | NP_060484 |
| 1157 | BCL3 | NP_005169 |
| 1158 | BCL6 | NP_001697 |
| 1159 | C3AR1 | NP_004045 |
| 1160 | CAMK2G | NP_001213 |
| 1161 | CCND3 | NP_001751 |
| 1162 | CCR7 | NP_001829 |
| 1163 | CD52 | NP_001794 |
| 1164 | CD55 | NP_000565 |
| 1165 | CD63 | NP_001771 |
| 1166 | CEBPB | NP_005185 |
| 1167 | CEP192 | NP_115518 |
| 1168 | CHN2 | NP_004058 |
| 1169 | CLIP4 | NP_078968 |
| 1170 | CNOT7 | NP_037486 |
| 1171 | CSNK1G2 | NP_001310 |
| 1172 | CSTB | NP_000091 |
| 1173 | DNAJC10 | NP_061854 |
| 1174 | ENO1 | NP_001419 |
| 1175 | ERLIN1 | NP_006450 |
| 1176 | ETV6 | NP_001978 |
| 1177 | EXOSC1O | NP_002676 |
| 1178 | EXOSC2 | NP_055100 |
| 1179 | EXOSC9 | NP_005024 |
| 1180 | FBL | NP_001427 |
| 1181 | FBXO11 | NP_079409 |
| 1182 | FCER1G | NP_004097 |
| 1183 | FGR | NP_005239 |
| 1184 | FLII | NP_002009 |
| 1185 | FLOT1 | NP_005794 |
| 1186 | FNTA | NP_002018 |
| 1187 | G6PD | NP_000393 |
| 1188 | GLG1 | NP_036333 |
| 1189 | GNG5 | NP_005265 |
| 1190 | GPI | NP_000166 |
| 1191 | GRINA | NP_000828 |
| 1192 | HCK | NP_002101 |
| 1193 | HERC6 | NP_060382 |
| 1194 | HLA-DPA1 | NP_291032 |
| 1195 | IL10RA | NP_001549 |
| 1196 | IMP3 | NP_060755 |
| 1197 | IRF1 | NP_002189 |
| 1198 | IRF8 | NP_002154 |
| 1199 | JUNB | NP_002220 |
| 1200 | KIF1B | NP_055889 |
| 1201 | LAP3 | NP_056991 |
| 1202 | LDHA | NP_005557 |
| 1203 | LY9 | NP_002339 |
| 1204 | METAP1 | NP_055958 |
| 1205 | MGEA5 | NP_036347 |
| 1206 | MLLT10 | NP_004632 |
| 1207 | MYD88 | NP_002459 |
| 1208 | NFIL3 | NP_005375 |
| 1209 | NFKBIA | NP_065390 |
| 1210 | NOSIP | NP_057037 |
| 1211 | NUMB | NP_003735 |
| 1212 | NUP160 | NP_056046 |
| 1213 | PCBP1 | NP_006187 |
| 1214 | PCID2 | NP_060856 |
| 1215 | PCMT1 | NP_005380 |
| 1216 | PGD | NP_002622 |
| 1217 | PLAUR | NP_002650 |
| 1218 | PLSCR1 | NP_066928 |
| 1219 | POMP | NP_057016 |
| 1220 | PREPL | NP_006027 |
| 1221 | PRKCD | NP_006245 |
| 1222 | RAB27A | NP_004571 |
| 1223 | RAB7A | NP_004628 |
| 1224 | RALB | NP_002872 |
| 1225 | RBMS1 | NP_002888 |
| 1226 | RIT1 | NP_008843 |
| 1227 | RPL15 | NP_002939 |
| 1228 | RPL22 | NP_000974 |
| 1229 | RPL9 | NP_000652 |
| 1230 | RPS14 | NP_005608 |
| 1231 | RPS4X | NP_000998 |
| 1232 | RTN4 | NP_008939 |
| 1233 | SEH1L | NP_112493 |
| 1234 | SERBP1 | NP_056455 |
| 1235 | SERPINB1 | NP_109591 |
| 1236 | SERTAD2 | NP_055570 |
| 1237 | SETX | NP_055861 |
| 1238 | SH3GLB1 | NP_057093 |
| 1239 | SLAMF7 | NP_067004 |
| 1240 | SOCS3 | NP_003946 |
| 1241 | SORT1 | NP_002950 |
| 1242 | SPI1 | NP_003111 |
| 1243 | SQRDL | NP_057022 |
| 1244 | STAT3 | NP_003141 |
| 1245 | SUCLG2 | NP_003839 |
| 1245 | TANK | NP_004171 |
| 1247 | TAP1 | NP_000584 |
| 1248 | TCF4 | NP_003190 |
| 1249 | TCIRG1 | NP_006010 |
| 1250 | TIMP2 | NP_003246 |
| 1251 | TMEM106B | NP_060844 |
| 1252 | TMEM50B | NP_006125 |
| 1253 | TNIP1 | NP_006049 |
| 1254 | TOP2B | NP_001059 |
| 1255 | TPP1 | NP_000382 |
| 1256 | TRAF3IP3 | NP_079504 |
| 1257 | TRIB1 | NP_079471 |
| 1258 | TRIT1 | NP_060116 |
| 1259 | TROVE2 | NP_004591 |
| 1260 | TRPC4AP | NP_056453 |
| 1261 | TSPO | NP_000705 |
| 1262 | TTC17 | NP_060729 |
| 1263 | TUBA1B | NP_006073 |
| 1264 | UBE2L6 | NP_004214 |
| 1265 | UFM1 | NP_057701 |
| 1266 | UPP1 | NP_003355 |
| 1267 | USP34 | NP_055524 |
| 1268 | VAMP3 | NP_004772 |
| 1269 | WARS | NP_004175 |
| 1270 | WAS | NP_000368 |
| 1271 | ZBED5 | NP_067034 |
| 1272 | ZMYND11 | NP_006615 |
| 1273 | ZNF266 | NP_006622 |

TABLE 9
INSIRS BIOMARKER DETAILS INCLUDING;
SEQUENCE IDENTIFICATION NUMBER,
GENE SYMBOL, ENSEMBL TRANSCRIPT
ID AND DNA SEQUENCE

| Seq ID | Gene | Ensembl Transcript |
|---|---|---|
| # DNA | Symbol | ID |
| 1274 | ADAM19 | ENST00000257527 |
| 1275 | ADRBK2 | ENST00000324198 |
| 1276 | ADSL | ENST00000623063 |
| 1277 | AGA | ENST00000264595 |
| 1278 | AGPAT5 | ENST00000285518 |
| 1279 | ANK3 | ENST00000355288 |
| 1280 | ARHGAP5 | ENST00000556611 |
| 1281 | ARHGEF6 | ENST00000250617 |
| 1282 | ARL6IP5 | ENST00000273258 |
| 1283 | ASCC3 | ENST00000369162 |
| 1284 | ATP8A1 | ENST00000381668 |
| 1285 | ATXN3 | ENST00000558190 |
| 1286 | BCKDHB | ENST00000356489 |
| 1287 | BRCC3 | ENST00000369462 |
| 1288 | BTN2A1 | ENST00000312541 |
| 1289 | BZW2 | ENST00000258761 |
| 1290 | C14orf1 | ENST00000256319 |
| 1291 | CD28 | ENST00000324106 |
| 1292 | CD40LG | ENST00000370629 |
| 1293 | CD84 | ENST00000368054 |
| 1294 | CDA | ENST00000375071 |
| 1295 | CDK6 | ENST00000265734 |
| 1296 | CDKN1B | ENST00000228872 |
| 1297 | CKAP2 | ENST00000258607 |
| 1298 | CLEC4E | ENST00000299663 |
| 1299 | CLOCK | ENST00000309964 |
| 1300 | CLUAP1 | ENST00000576634 |
| 1301 | CPA3 | ENST00000296046 |
| 1302 | CREB1 | ENST00000353267 |
| 1303 | CYP4F3 | ENST00000221307 |
| 1304 | CYSLTR1 | ENST00000373304 |
| 1305 | DIAPH2 | ENST00000324765 |
| 1306 | EFHD2 | ENST00000375980 |
| 1307 | EFTUD1 | ENST00000268206 |
| 1308 | EIF5B | ENST00000289371 |
| 1309 | ENOSF1 | ENST00000251101 |
| 1310 | ENTPD1 | ENST00000371205 |
| 1311 | ERCC4 | ENST00000311895 |
| 1312 | ESF1 | ENST00000202816 |
| 1313 | EXOC7 | ENST00000332065 |
| 1314 | EXTL3 | ENST00000220562 |
| 1315 | FASTKD2 | ENST00000236980 |
| 1316 | FCF1 | ENST00000341162 |
| 1317 | FUT8 | ENST00000557164 |
| 1318 | G3BP1 | ENST00000356245 |
| 1319 | GAB2 | ENST00000340149 |
| 1320 | GGPS1 | ENST00000358966 |
| 1321 | GOLPH3L | ENST00000271732 |
| 1322 | HAL | ENST00000261208 |
| 1323 | HEATR1 | ENST00000366582 |
| 1324 | HEBP2 | ENST00000607197 |
| 1325 | HIBCH | ENST00000359678 |
| 1326 | HLTF | ENST00000310053 |
| 1327 | HRH4 | ENST00000256906 |
| 1328 | IDE | ENST00000265986 |
| 1329 | IGF2R | ENST00000356956 |
| 1330 | IKBKAP | ENST00000374647 |
| 1331 | IPO7 | ENST00000379719 |
| 1332 | IQCB1 | ENST00000310864 |
| 1333 | IQSEC1 | ENST00000273221 |
| 1334 | KCMF1 | ENST00000409785 |
| 1335 | KIAA0391 | ENST00000534898 |
| 1336 | KLHL20 | ENST00000209884 |
| 1337 | KLHL24 | ENST00000454652 |
| 1338 | KRIT1 | ENST00000340022 |
| 1339 | LANCL1 | ENST00000450366 |
| 1340 | LARP1 | ENST00000336314 |
| 1341 | LARP4 | ENST00000398473 |
| 1342 | LRRC8D | ENST00000394593 |
| 1343 | MACF1 | ENST00000361689 |
| 1344 | MANEA | ENST00000358812 |
| 1345 | MDH1 | ENST00000233114 |
| 1346 | METTL5 | ENST00000260953 |
| 1347 | MLLT10 | ENST00000377072 |
| 1348 | MRPS10 | ENST00000053468 |
| 1349 | MTO1 | ENST00000498286 |
| 1350 | MTRR | ENST00000440940 |
| 1351 | MXD1 | ENST00000264444 |
| 1352 | MYH9 | ENST00000216181 |
| 1353 | MYO9A | ENST00000356056 |
| 1354 | NCBP1 | ENST00000375147 |
| 1355 | NEK1 | ENST00000439128 |
| 1356 | NFX1 | ENST00000379540 |
| 1357 | NGDN | ENST00000397154 |
| 1358 | NIP7 | ENST00000254940 |
| 1359 | NOL10 | ENST00000381685 |
| 1360 | NOL8 | ENST00000442668 |
| 1361 | NOTCH2 | ENST00000256646 |
| 1362 | NR2C1 | ENST00000333003 |
| 1363 | PELI1 | ENST00000358912 |
| 1364 | PEX1 | ENST00000248633 |
| 1365 | PHC3 | ENST00000495893 |
| 1366 | PLCL2 | ENST00000432376 |
| 1367 | POLR2A | ENST00000621442 |
| 1368 | PRKAB2 | ENST00000254101 |
| 1369 | PRPF39 | ENST00000355765 |
| 1370 | PRUNE | ENST00000271620 |
| 1371 | PSMD5 | ENST00000210313 |
| 1372 | PTGS1 | ENST00000362012 |
| 1373 | PWP1 | ENST00000412830 |
| 1374 | RAB11FIP2 | ENST00000355624 |
| 1375 | RABGAP1L | ENST00000251507 |
| 1376 | RAD50 | ENST00000378823 |
| 1377 | RBM26 | ENST00000267229 |
| 1378 | RCBTB2 | ENST00000344532 |
| 1379 | RDX | ENST00000343115 |
| 1380 | REPS1 | ENST00000258062 |
| 1381 | RFC1 | ENST00000349703 |
| 1382 | RGS2 | ENST00000235382 |
| 1383 | RIOK2 | ENST00000283109 |
| 1384 | RMND1 | ENST00000367303 |
| 1385 | RNF170 | ENST00000527424 |
| 1386 | RNMT | ENST00000383314 |
| 1387 | RRAGC | ENST00000373001 |
| 1388 | S100PBP | ENST00000373475 |
| 1389 | SIDT2 | ENST00000324225 |
| 1390 | SLC35A3 | ENST00000370155 |
| 1391 | SLC35D1 | ENST00000235345 |
| 1392 | SLCO3A1 | ENST00000318445 |
| 1393 | SMC3 | ENST00000361804 |
| 1394 | SMC6 | ENST00000351948 |
| 1395 | STK17B | ENST00000263955 |
| 1396 | SUPT7L | ENST00000337768 |
| 1397 | SYNE2 | ENST00000344113 |
| 1398 | SYT11 | ENST00000368324 |
| 1399 | TBCE | ENST00000366601 |
| 1400 | TCF12 | ENST00000267811 |
| 1401 | TCF7L2 | ENST00000369397 |
| 1402 | TFIP11 | ENST00000407690 |
| 1403 | TGS1 | ENST00000260129 |
| 1404 | THOC2 | ENST00000245838 |
| 1405 | TIA1 | ENST00000415783 |
| 1406 | TLK1 | ENST00000431350 |
| 1407 | TMEM87A | ENST00000389834 |
| 1408 | TNFSF8 | ENST00000223795 |
| 1409 | TRAPPC2 | ENST00000359680 |
| 1410 | TRIP11 | ENST00000267622 |
| 1411 | TTC17 | ENST00000039989 |
| 1412 | TTC27 | ENST00000317907 |
| 1413 | VEZT | ENST00000436874 |
| 1414 | VNN3 | ENST00000207771 |
| 1415 | VPS13A | ENST00000357409 |
| 1416 | VPS13B | ENST00000355155 |
| 1417 | VPS13C | ENST00000249837 |
| 1418 | WDR70 | ENST00000265107 |
| 1419 | XPO4 | ENST00000255305 |
| 1420 | YEATS4 | ENST00000247843 |
| 1421 | YTHDC2 | ENST00000161863 |
| 1422 | ZMYND11 | ENST00000397962 |
| 1423 | ZNF507 | ENST00000311921 |
| 1424 | ZNF562 | ENST00000293648 |

TABLE 10
INSIRS BIOMARKER DETAILS INCLUDING;
SEQUENCE IDENTIFICATION NUMBER,
GENE SYMBOL, GENBANK ACCESSION
AND AMINO ACID SEQUENCE

| SEQ ID | Gene | GenBank |
|---|---|---|
| # AA | Symbol | Accession |
| 1425 | ADAM19 | NP_150377 |
| 1426 | ADRBK2 | NP_005151 |
| 1427 | ADSL | NP_000017 |
| 1428 | AGA | NP_000018 |
| 1429 | AGPAT5 | NP_060831 |
| 1430 | ANK3 | NP_001140 |
| 1431 | ARHGAP5 | NP_001164 |
| 1432 | ARHGEF6 | NP_004831 |
| 1433 | ARL6IP5 | NP_006398 |
| 1434 | ASCC3 | NP_006819 |
| 1435 | ATP8A1 | NP_006086 |
| 1436 | ATXN3 | NP_004984 |
| 1437 | BCKDHB | NP_000047 |
| 1438 | BRCC3 | NP_077308 |
| 1439 | BTN2A1 | NP_008980 |
| 1440 | BZW2 | NP_054757 |
| 1441 | C14orf1 | NP_009107 |
| 1442 | CD28 | NP_006130 |
| 1443 | CD40LG | NP_000065 |
| 1444 | CD84 | NP_003865 |
| 1445 | CDA | NP_001776 |
| 1446 | CDK6 | NP_001250 |
| 1447 | CDKN1B | NP_004055 |
| 1448 | CKAP2 | NP_060674 |
| 1449 | CLEC4E | NP_055173 |
| 1450 | CLOCK | NP_004889 |
| 1451 | CLUAP1 | NP_055856 |
| 1452 | CPA3 | NP_001861 |
| 1453 | CREB1 | NP_004370 |
| 1454 | CYP4F3 | NP_000887 |
| 1455 | CYSLTR1 | NP_006630 |
| 1456 | DIAPH2 | NP_006720 |
| 1457 | EFHD2 | NP_077305 |
| 1458 | EFTUD1 | NP_078856 |
| 1459 | EIF5B | NP_056988 |
| 1460 | ENOSF1 | NP_059982 |
| 1461 | ENTPD1 | NP_001767 |
| 1462 | ERCC4 | NP_005227 |
| 1463 | ESF1 | NP_057733 |
| 1464 | EXOC7 | NP_056034 |
| 1465 | EXTL3 | NP_001431 |
| 1466 | FASTKD2 | NP_055744 |
| 1467 | FCF1 | NP_057046 |
| 1468 | FUT8 | NP_004471 |
| 1469 | G3BP1 | NP_005745 |
| 1470 | GAB2 | NP_036428 |
| 1471 | GGPS1 | NP_001032354 |
| 1472 | GOLPH3L | NP_060648 |
| 1473 | HAL | NP_002099 |
| 1474 | HEATR1 | NP_060542 |
| 1475 | HEBP2 | NP_055135 |
| 1476 | HIBCH | NP_055177 |
| 1477 | HLTF | NP_003062 |
| 1478 | HRH4 | NP_067637 |
| 1479 | IDE | NP_004960 |
| 1480 | IGF2R | NP_000867 |
| 1481 | IKBKAP | NP_003631 |
| 1482 | IPO7 | NP_006382 |
| 1483 | IQCB1 | NP_001018864 |
| 1484 | IQSEC1 | NP_055684 |
| 1485 | KCMF1 | NP_064507 |
| 1486 | KIAA0391 | NP_055487 |
| 1487 | KLHL20 | NP_055273 |
| 1488 | KLHL24 | NP_060114 |
| 1489 | KRIT1 | NP_004903 |
| 1490 | LANCL1 | NP_006046 |
| 1491 | LARP1 | NP_056130 |
| 1492 | LARP4 | NP_443111 |
| 1493 | LRRC8D | NP_060573 |
| 1494 | MACF1 | NP_036222 |
| 1495 | MANEA | NP_078917 |
| 1496 | MDH1 | NP_005908 |
| 1497 | METTL5 | NP_054887 |
| 1498 | MLLT10 | NP_004632 |
| 1499 | MRPS10 | NP_060611 |
| 1500 | MTO1 | NP_036255 |
| 1501 | MTRR | NP_002445 |
| 1502 | MXD1 | NP_002348 |
| 1503 | MYH9 | NP_002464 |
| 1504 | MYO9A | NP_008832 |
| 1505 | NCBP1 | NP_002477 |
| 1506 | NEK1 | NP_036356 |
| 1507 | NFX1 | NP_002495 |
| 1508 | NGDN | NP_056329 |
| 1509 | NIP7 | NP_057185 |
| 1510 | NOL10 | NP_079170 |
| 1511 | NOL8 | NP_060418 |
| 1512 | NOTCH2 | NP_077719 |
| 1513 | NR2C1 | NP_003288 |
| 1514 | PELI1 | NP_065702 |
| 1515 | PEX1 | NP_000457 |
| 1516 | PHC3 | NP_079223 |
| 1517 | PLCL2 | NP_055999 |
| 1518 | POLR2A | NP_000928 |
| 1519 | PRKAB2 | NP_005390 |
| 1520 | PRPF39 | NP_060392 |
| 1521 | PRUNE | NP_067045 |
| 1522 | PSMD5 | NP_005038 |
| 1523 | PTGS1 | NP_000953 |
| 1524 | PWP1 | NP_008993 |
| 1525 | RAB11FIP2 | NP_055719 |
| 1526 | RABGAP1L | NP_055672 |
| 1527 | RAD50 | NP_005723 |
| 1528 | RBM26 | NP_071401 |
| 1529 | RCBTB2 | NP_001259 |
| 1530 | RDX | NP_002897 |
| 1531 | REPS1 | NP_114128 |
| 1532 | RFC1 | NP_002904 |
| 1533 | RGS2 | NP_002914 |
| 1534 | RIOK2 | NP_060813 |
| 1535 | RMND1 | NP_060379 |
| 1536 | RNF170 | NP_112216 |
| 1537 | RNMT | NP_003790 |
| 1538 | RRAGC | NP_071440 |
| 1539 | S100PBP | NP_073590 |
| 1540 | SIDT2 | NP_001035545 |
| 1541 | SLC35A3 | NP_036375 |
| 1542 | SLC35D1 | NP_055954 |
| 1543 | SLCO3A1 | NP_037404 |
| 1544 | SMC3 | NP_005436 |
| 1545 | SMC6 | NP_078900 |
| 1546 | STK17B | NP_004217 |
| 1547 | SUPT7L | NP_055675 |
| 1548 | SYNE2 | NP_055995 |
| 1549 | SYT11 | NP_689493 |
| 1550 | TBCE | NP_003184 |
| 1551 | TCF12 | NP_003196 |
| 1552 | TCF7L2 | NP_110383 |
| 1553 | TFIP11 | NP_036275 |
| 1554 | TGS1 | NP_079107 |
| 1555 | THOC2 | NP_001075019 |
| 1556 | TIA1 | NP_071320 |
| 1557 | TLK1 | NP_036422 |
| 1558 | TMEM87A | NP_056312 |
| 1559 | TNFSF8 | NP_001235 |
| 1560 | TRAPPC2 | NP_055378 |
| 1561 | TRIP11 | NP_004230 |
| 1562 | TTC17 | NP_060729 |
| 1563 | TTC27 | NP_060205 |
| 1564 | VEZT | NP_060069 |
| 1565 | VNN3 | NP_001278631 |
| 1566 | VPS13A | NP_056001 |
| 1567 | VPS13B | NP_056058 |
| 1568 | VPS13C | NP_060154 |
| 1569 | WDR70 | NP_060504 |
| 1570 | XPO4 | NP_071904 |
| 1571 | YEATS4 | NP_006521 |
| 1572 | YTHDC2 | NP_073739 |
| 1573 | ZMYND11 | NP_006615 |
| 1574 | ZNF507 | NP_055725 |
| 1575 | ZNF562 | NP_060126 |

TABLE 11
EXEMPLARY ESCHERICHIA COLI DNA SEQUENCE
INCLUDING SINGLE NUCLEOTIDE POLYMORPHISMS
(SNPS) AT POSITIONS 396 AND 398 (BOLDED)

| SEQ ID # DNA | Organism | GenBank Accession |
|---|---|---|
| 1576 | Escherichia coli | NR_074891 |

TABLE 12
DESCRIPTION OF DATASETS AND NUMBER OF
SAMPLES USED AS PART OF DISCOVERY OF
DERIVED BIOMARKERS FOR BASIRS
The total number of genes that were able to be used across all of these
datasets was 3698. All useable samples in these datasets were randomly
divided into BaSIRS discovery and validation (see Table 13) sets.

| Dataset Identifier | Source | # Samples | Control | Case |
|---|---|---|---|---|
| FEVER | In-house | 30 | 8 | 22 |
| FEVER (Bact vs Viral) | In-house | 34 | 7 | 27 |
| GAPPSS | In-house | 32 | 15 | 17 |
| MARS (Healthy) | In-house | 40 | 20 | 20 |
| MARS (Healthy vs All) | In-house | 459 | 21 | 438 |
| MARS (SIRS) | In-house | 73 | 57 | 16 |
| GSE16129 | GEO | 19 | 6 | 13 |
| GSE30119 | GEO | 40 | 13 | 27 |
| GSE40396 | GEO | 16 | 10 | 6 |
| GSE6269 | GEO | 16 | 6 | 10 |
| GSE63990 | GEO | 79 | 44 | 35 |
| GSE63990 (Bact vs Viral) | GEO | 93 | 58 | 35 |
| GSE74224 | GEO | 53 | 16 | 37 |

| | | |
|---|---|---|
| 984 | 281 | 703 |

TABLE 13
DESCRIPTION OF DATASETS AND NUMBER
OF SAMPLES USED AS PART OF VALIDATION
OF DERIVED BIOMARKERS FOR BASIRS

| Dataset Identifier | Source | # Samples | Control | Case |
|---|---|---|---|---|
| FEVER | In-house | 30 | 8 | 22 |
| FEVER (Bact vs Viral) | In-house | 34 | 7 | 27 |
| GAPPSS | In-house | 31 | 14 | 17 |
| MARS (Healthy) | In-house | 40 | 20 | 20 |
| MARS (Healthy vs All) | In-house | 459 | 21 | 438 |
| MARS (SIRS) | In-house | 71 | 56 | 15 |
| GSE16129 | GEO | 39 | 10 | 29 |
| GSE30119 | GEO | 73 | 31 | 42 |
| GSE40396 | GEO | 20 | 12 | 8 |
| GSE6269 | GEO | 25 | 6 | 19 |
| GSE63990 | GEO | 79 | 44 | 35 |
| GSE63990 (Bact vs Viral) | GEO | 92 | 57 | 35 |
| GSE74224 | GEO | 52 | 15 | 37 |

| | | |
|---|---|---|
| 1045 | 301 | 744 |

TABLE 14
DESCRIPTION OF CONTROL DATASETS AND
NUMBER OF SAMPLES USED FOR SUBTRACTION
FROM THE DERIVED BIOMARKERS FOR BASIRS
The subtraction process ensured that the
BaSIRS derived biomarkers were specific.

| Dataset | Numbers | Comments | Case | Control | Total |
|---|---|---|---|---|---|
| GSE11908 | 58 sterile inflammation; | General inflammation: | 6 | 58 | 64 |
| | 6 Staph or E. coli infection | inSIRS = SLE, Diabetes, | | | |
| | | Melanoma | | | |
| GSE52428 | 39 healthy; 41 Influenza A | Influenza virus | 41 | 39 | 80 |
| GSE19301 | 394 healthy; 166 Asthma | Asthma | 166 | 394 | 560 |
| GSE38485 | 96 healthy; 106 schizophrenia | Schizophrenia | 106 | 96 | 202 |
| GSE29532 | 6 Healthy; 25 acute coronary | Coronary artery disease | 25 | 6 | 31 |
| | syndrome | | | | |
| GSE46743 | 160 baseline; 160 stress | Depression/stress | 160 | 160 | 320 |
| GSE64813 | 141 Pre-deployment; 47 post- | PTSD | 47 | 141 | 188 |
| | deployment Post- Traumatic | | | | |
| | Stress Disorder | | | | |
| GSE51808 | 9 healthy; 28 infected | Dengue Virus | 28 | 9 | 37 |
| GSE41752 | 11 controls; 19 cases | Lassa Virus | 19 | 11 | 30 |
| GSE42834 | 198 healthy; 46 controls | Patients with tuberculosis, | 198 | 35 | 233 |
| | | sarcoidosis, and lung | | | |
| | | cancer (pneumonia patients | | | |
| | | removed) | | | |
| | | | 796 | 949 | 1745 |

TABLE 15
PERFORMANCE (AS MEASURED BY AUC) OF THE
FINAL BASIRS SIGNATURE IN EACH OF THE DISCOVERY,
VALIDATION AND CONTROL DATASETS

| Dataset | AUC | Analysis |
|---|---|---|
| FEVER | 0.858 | Discovery |
| FEVER (Bact vs Viral) | 0.910 | Discovery |
| GAPPSS | 0.925 | Discovery |
| GSE16129 | 1.000 | Discovery |
| GSE30119 | 0.892 | Discovery |
| GSE36809 | 0.899 | Discovery |
| GSE40012 (Healthy) | 0.834 | Discovery |
| GSE40012 (SIRS) | 0.834 | Discovery |
| GSE40396 | 1.000 | Discovery |
| GSE6269 | 1.000 | Discovery |
| GSE63990 | 0.890 | Discovery |
| GSE63990 (Bact vs Viral) | 0.940 | Discovery |
| GSE74224 | 0.856 | Discovery |
| MARS (Healthy) | 1.000 | Discovery |
| MARS (Healthy vs All) | 0.987 | Discovery |
| MARS (SIRS) | 0.935 | Discovery |
| FEVER | 0.926 | Validation |
| FEVER (Bact vs Viral) | 0.799 | Validation |
| GAPPSS | 0.916 | Validation |
| GSE16129 | 0.928 | Validation |
| GSE30119 | 0.856 | Validation |
| GSE36809 | 0.729 | Validation |
| GSE40012 (Healthy) | 0.910 | Validation |
| GSE40012 (SIRS) | 0.551 | Validation |
| GSE40396 | 0.979 | Validation |
| GSE6269 | 0.965 | Validation |
| GSE63990 | 0.795 | Validation |
| GSE63990 (Bact vs Viral) | 0.873 | Validation |
| GSE74224 | 0.942 | Validation |
| MARS (Healthy) | 1.000 | Validation |
| MARS (Healthy vs All) | 0.986 | Validation |
| MARS_SIRS | 0.927 | Validation |
| GSE19301 | 0.573 | Non-BaSIRS |
| GSE29532 | 0.807 | Non-BaSIRS |
| GSE38485 | 0.569 | Non-BaSIRS |
| GSE64813 | 0.674 | Non-BaSIRS |
| GSE46743 | 0.517 | Non-BaSIRS |
| GSE11908 | 0.546 | Non-BaSIRS |
| GSE42834 | 0.647 | Non-BaSIRS |
| GSE52428 | 0.633 | Non-BaSIRS |
| GSE41752 | 0.694 | Non-BaSIRS |
| GSE51808 | 0.484 | Non-BaSIRS |

TABLE 16
PERFORMANCE (AS MEASURED BY AUC) OF THE TOP 102 BASIRS DERIVED
BIOMARKERS IN EACH OF THE BASIRS VALIDATION DATASETS.
Only those derived biomarkers with a mean AUC >0.85 were used in a greedy
search to identify the best combination of derived biomarkers

| | | | | | | FEVER | GSE63990 | |
|---|---|---|---|---|---|---|---|---|
| | | | | | MARS | (Bact vs | (Bact vs | |
| Derived Biomarker | FEVER | GAPPSS | GSE63990 | GSE74224 | (SIRS) | Viral) | Viral) | Mean |
| PDGFC_KLRF1 | 0.972 | 0.882 | 0.823 | 0.923 | 0.933 | 0.947 | 0.899 | 0.911 |
| TMEM165_PARP8 | 0.960 | 0.950 | 0.863 | 0.796 | 0.865 | 0.931 | 0.954 | 0.903 |
| ITGA7_KLRF1 | 0.966 | 0.916 | 0.767 | 0.888 | 0.955 | 0.963 | 0.828 | 0.897 |
| CR1_GAB2 | 0.983 | 0.878 | 0.891 | 0.829 | 0.854 | 0.937 | 0.903 | 0.896 |
| PCOLCE2_KLRF1 | 0.966 | 0.891 | 0.826 | 0.897 | 0.894 | 0.947 | 0.850 | 0.896 |
| ITGA7_INPP5D | 0.938 | 0.903 | 0.792 | 0.850 | 0.971 | 0.915 | 0.894 | 0.895 |
| GALNT2_CCNK | 0.920 | 0.916 | 0.847 | 0.872 | 0.889 | 0.963 | 0.842 | 0.893 |
| PDGFC_KLRD1 | 0.920 | 0.882 | 0.830 | 0.877 | 0.889 | 0.937 | 0.911 | 0.892 |
| PDGFC_CCNK | 0.949 | 0.916 | 0.821 | 0.899 | 0.860 | 0.910 | 0.886 | 0.891 |
| CR1_ADAM19 | 0.983 | 0.954 | 0.825 | 0.802 | 0.842 | 0.947 | 0.882 | 0.891 |
| ITGA7_CCNK | 0.949 | 0.941 | 0.859 | 0.816 | 0.869 | 0.905 | 0.889 | 0.890 |
| PCOLCE2_PRSS23 | 0.920 | 0.916 | 0.827 | 0.886 | 0.876 | 0.915 | 0.877 | 0.888 |
| TMEM165_PRPF38B | 0.977 | 0.933 | 0.852 | 0.840 | 0.743 | 0.937 | 0.935 | 0.888 |
| PDGFC_PHF3 | 0.926 | 0.924 | 0.814 | 0.825 | 0.918 | 0.889 | 0.911 | 0.887 |
| GAS7_NLRP1 | 0.909 | 0.958 | 0.857 | 0.766 | 0.965 | 0.831 | 0.912 | 0.885 |
| PCOLCE2_KLRD1 | 0.903 | 0.908 | 0.860 | 0.867 | 0.846 | 0.921 | 0.891 | 0.885 |
| GALNT2_KLRD1 | 0.926 | 0.853 | 0.841 | 0.852 | 0.899 | 0.947 | 0.871 | 0.884 |
| KIAA0101_IL2RB | 0.949 | 0.845 | 0.853 | 0.829 | 0.855 | 0.958 | 0.897 | 0.884 |
| CR1_HAL | 1.000 | 0.815 | 0.869 | 0.791 | 0.950 | 0.926 | 0.834 | 0.884 |
| PDGFC_RFC1 | 0.989 | 0.723 | 0.825 | 0.892 | 0.893 | 0.947 | 0.911 | 0.883 |
| ENTPD7_KLRF1 | 0.977 | 0.874 | 0.792 | 0.854 | 0.931 | 0.952 | 0.795 | 0.882 |
| PDGFC_GRK5 | 0.864 | 0.958 | 0.827 | 0.877 | 0.890 | 0.857 | 0.901 | 0.882 |
| PCOLCE2_PYHIN1 | 0.920 | 0.866 | 0.844 | 0.798 | 0.902 | 0.931 | 0.910 | 0.882 |
| GAS7_PRKDC | 0.903 | 0.950 | 0.807 | 0.654 | 0.974 | 0.963 | 0.914 | 0.881 |
| GAS7_CAMK1D | 0.892 | 0.899 | 0.867 | 0.755 | 0.908 | 0.931 | 0.910 | 0.880 |
| MGAM_MME | 0.977 | 0.920 | 0.836 | 0.744 | 0.957 | 0.841 | 0.884 | 0.880 |
| GAS7_GAB2 | 0.841 | 0.975 | 0.824 | 0.773 | 0.933 | 0.889 | 0.911 | 0.878 |
| PDGFC_INPP5D | 0.884 | 0.903 | 0.793 | 0.894 | 0.858 | 0.921 | 0.883 | 0.876 |
| ST3GAL2_PRKD2 | 0.795 | 0.958 | 0.846 | 0.921 | 0.771 | 0.952 | 0.889 | 0.876 |
| HK3_INPP5D | 0.966 | 0.815 | 0.761 | 0.874 | 0.917 | 0.942 | 0.856 | 0.876 |
| ENTPD7_KLRD1 | 0.926 | 0.830 | 0.840 | 0.823 | 0.895 | 0.947 | 0.865 | 0.875 |
| PDGFC_SIDT1 | 1.000 | 0.794 | 0.805 | 0.773 | 0.856 | 0.963 | 0.936 | 0.875 |
| PDGFC_SPIN1 | 0.955 | 0.737 | 0.805 | 0.845 | 0.914 | 0.974 | 0.893 | 0.875 |
| PCOLCE2_YPEL1 | 0.966 | 0.916 | 0.866 | 0.849 | 0.787 | 0.862 | 0.869 | 0.873 |
| PDGFC_SYTL2 | 0.972 | 0.807 | 0.808 | 0.852 | 0.860 | 0.921 | 0.894 | 0.873 |
| PDGFC_TGFBR3 | 0.938 | 0.790 | 0.817 | 0.802 | 0.889 | 0.963 | 0.914 | 0.873 |
| IGFBP7_KLRF1 | 0.841 | 1.000 | 0.832 | 0.890 | 0.813 | 0.889 | 0.846 | 0.873 |
| PCOLCE2_RUNX2 | 0.909 | 0.916 | 0.806 | 0.917 | 0.962 | 0.770 | 0.832 | 0.873 |
| SMPDL3A_KLRD1 | 0.881 | 0.777 | 0.798 | 0.877 | 0.932 | 0.958 | 0.888 | 0.873 |
| GALNT2_KLRF1 | 0.943 | 0.786 | 0.812 | 0.872 | 0.927 | 0.942 | 0.826 | 0.873 |
| PDGFC_YPEL1 | 0.977 | 0.819 | 0.818 | 0.863 | 0.835 | 0.910 | 0.886 | 0.873 |
| HK3_DENND3 | 0.920 | 0.824 | 0.778 | 0.960 | 0.967 | 0.820 | 0.836 | 0.872 |
| PDGFC_CBLL1 | 0.989 | 0.815 | 0.782 | 0.825 | 0.911 | 0.873 | 0.910 | 0.872 |
| OPLAH_KLRD1 | 0.943 | 0.723 | 0.830 | 0.838 | 0.924 | 0.952 | 0.892 | 0.872 |
| OPLAH_ZHX2 | 0.972 | 0.777 | 0.812 | 0.849 | 0.914 | 0.915 | 0.860 | 0.871 |
| PDGFC_RYK | 0.994 | 0.723 | 0.799 | 0.845 | 0.913 | 0.923 | 0.900 | 0.871 |
| PDGFC_IKZF5 | 0.932 | 0.765 | 0.809 | 0.933 | 0.915 | 0.825 | 0.913 | 0.870 |
| GALNT2_INPP5D | 0.926 | 0.912 | 0.819 | 0.771 | 0.874 | 0.931 | 0.858 | 0.870 |
| PDGFC_GCC2 | 0.915 | 0.782 | 0.805 | 0.872 | 0.898 | 0.915 | 0.905 | 0.870 |
| PDGFC_MBIP | 0.977 | 0.693 | 0.835 | 0.915 | 0.870 | 0.899 | 0.891 | 0.869 |
| COX15_UTRN | 0.943 | 0.899 | 0.858 | 0.796 | 0.814 | 0.926 | 0.837 | 0.868 |
| SMPDL3A_QRICH1 | 0.966 | 0.777 | 0.792 | 0.825 | 0.890 | 0.947 | 0.874 | 0.867 |
| PDGFC_LPIN2 | 0.841 | 0.861 | 0.836 | 0.849 | 0.808 | 0.974 | 0.901 | 0.867 |
| TSPO_NLRP1 | 0.903 | 0.676 | 0.832 | 0.899 | 0.975 | 0.915 | 0.867 | 0.867 |
| PCOLCE2_NMUR1 | 0.920 | 0.895 | 0.826 | 0.926 | 0.836 | 0.804 | 0.860 | 0.867 |
| FAM129A_GAB2 | 0.943 | 0.832 | 0.771 | 0.845 | 0.925 | 0.952 | 0.794 | 0.866 |
| ALPL_NLRP1 | 0.920 | 0.803 | 0.778 | 0.872 | 0.973 | 0.894 | 0.821 | 0.866 |
| TSPO_ZFP36L2 | 0.966 | 0.651 | 0.820 | 0.856 | 0.919 | 0.958 | 0.891 | 0.866 |
| ALPL_ZFP36L2 | 0.943 | 0.773 | 0.790 | 0.818 | 0.980 | 0.915 | 0.841 | 0.866 |
| PCOLCE2_FOXJ3 | 0.972 | 0.903 | 0.818 | 0.822 | 0.870 | 0.825 | 0.849 | 0.866 |
| PDGFC_KIAA0355 | 0.864 | 0.845 | 0.839 | 0.899 | 0.885 | 0.810 | 0.917 | 0.865 |
| PDGFC_KIAA0907 | 0.966 | 0.723 | 0.800 | 0.856 | 0.895 | 0.905 | 0.906 | 0.864 |
| GAS7_DOCK5 | 0.886 | 0.945 | 0.834 | 0.654 | 0.902 | 0.905 | 0.922 | 0.864 |
| CD82_CNNM3 | 0.960 | 0.714 | 0.882 | 0.859 | 0.871 | 0.889 | 0.872 | 0.864 |
| GAS7_EXTL3 | 0.949 | 0.941 | 0.856 | 0.598 | 0.871 | 0.937 | 0.895 | 0.864 |
| TSPO_RNASE6 | 0.938 | 0.685 | 0.806 | 0.829 | 0.974 | 0.937 | 0.874 | 0.863 |
| ALPL_MME | 0.920 | 0.857 | 0.779 | 0.814 | 0.979 | 0.878 | 0.807 | 0.862 |
| HK3_TLE3 | 0.892 | 0.853 | 0.724 | 0.957 | 0.954 | 0.831 | 0.822 | 0.862 |
| MCTP1_PARP8 | 0.830 | 0.866 | 0.833 | 0.923 | 0.880 | 0.847 | 0.854 | 0.862 |
| TSPO_HCLS1 | 0.920 | 0.912 | 0.783 | 0.894 | 0.860 | 0.788 | 0.872 | 0.861 |
| TSPO_CASS4 | 0.909 | 0.647 | 0.851 | 0.876 | 0.938 | 0.942 | 0.863 | 0.861 |
| GAS7_RBM23 | 0.903 | 0.983 | 0.740 | 0.650 | 0.902 | 0.931 | 0.910 | 0.860 |
| GAS7_EPHB4 | 0.929 | 0.941 | 0.842 | 0.591 | 0.871 | 0.952 | 0.893 | 0.860 |
| PDGFC_RBM15 | 0.955 | 0.756 | 0.769 | 0.858 | 0.921 | 0.942 | 0.810 | 0.859 |
| ADM_CLEC7A | 0.955 | 0.798 | 0.810 | 0.881 | 0.917 | 0.831 | 0.818 | 0.858 |
| PDGFC_LEPROTL1 | 0.943 | 0.815 | 0.733 | 0.811 | 0.898 | 0.963 | 0.842 | 0.858 |
| PDGFC_NPAT | 1.000 | 0.807 | 0.801 | 0.764 | 0.844 | 0.884 | 0.905 | 0.858 |
| TSPO_PLA2G7 | 0.909 | 0.643 | 0.822 | 0.872 | 0.930 | 0.947 | 0.877 | 0.857 |
| GALNT2_IK | 0.955 | 0.782 | 0.812 | 0.823 | 0.908 | 0.873 | 0.842 | 0.856 |
| CD82_JARID2 | 0.972 | 0.744 | 0.810 | 0.836 | 0.942 | 0.878 | 0.812 | 0.856 |
| PDGFC_ICK | 0.938 | 0.660 | 0.823 | 0.883 | 0.899 | 0.897 | 0.892 | 0.856 |
| GALNT2_SAP130 | 0.920 | 0.714 | 0.836 | 0.856 | 0.920 | 0.926 | 0.816 | 0.856 |
| PDGFC_FBXO28 | 0.895 | 0.769 | 0.780 | 0.868 | 0.930 | 0.865 | 0.881 | 0.855 |
| TSPO_GAB2 | 0.898 | 0.668 | 0.792 | 0.930 | 0.924 | 0.937 | 0.838 | 0.855 |
| COX15_INPP5D | 0.881 | 0.899 | 0.801 | 0.877 | 0.826 | 0.884 | 0.817 | 0.855 |
| ITGA7_LAG3 | 0.943 | 0.769 | 0.759 | 0.796 | 0.888 | 0.921 | 0.908 | 0.855 |
| TSPO_CAMK1D | 0.909 | 0.639 | 0.840 | 0.865 | 0.931 | 0.942 | 0.859 | 0.855 |
| OPLAH_POGZ | 0.955 | 0.761 | 0.758 | 0.865 | 0.877 | 0.905 | 0.864 | 0.855 |
| ALPL_RNASE6 | 0.920 | 0.794 | 0.753 | 0.852 | 0.962 | 0.894 | 0.804 | 0.854 |
| RAB32_NLRP1 | 0.926 | 0.866 | 0.779 | 0.897 | 0.939 | 0.746 | 0.826 | 0.854 |
| TLR5_SEMA4D | 0.886 | 0.845 | 0.812 | 0.741 | 0.902 | 0.915 | 0.876 | 0.854 |
| IMPDH1_NLRP1 | 0.875 | 0.697 | 0.810 | 0.901 | 0.943 | 0.921 | 0.830 | 0.854 |
| ALPL_CAMK1D | 0.915 | 0.756 | 0.779 | 0.879 | 0.938 | 0.905 | 0.800 | 0.853 |
| TSPO_NFIC | 0.915 | 0.639 | 0.815 | 0.892 | 0.910 | 0.947 | 0.854 | 0.853 |
| GAS7_HAL | 0.869 | 0.924 | 0.778 | 0.757 | 0.977 | 0.836 | 0.829 | 0.853 |
| PDGFC_NCOA6 | 0.821 | 0.769 | 0.841 | 0.928 | 0.907 | 0.825 | 0.877 | 0.853 |
| PDGFC_PIK3C2A | 0.886 | 0.824 | 0.756 | 0.793 | 0.926 | 0.921 | 0.861 | 0.852 |
| TSPO_ADAM19 | 0.881 | 0.685 | 0.758 | 0.941 | 0.915 | 0.942 | 0.844 | 0.852 |
| CD82_NOV | 0.943 | 0.718 | 0.813 | 0.903 | 0.937 | 0.878 | 0.768 | 0.851 |
| PDGFC_PDS5B | 0.892 | 0.744 | 0.799 | 0.861 | 0.918 | 0.868 | 0.872 | 0.850 |
| FIG4_INPP5D | 0.869 | 0.908 | 0.724 | 0.818 | 0.981 | 0.878 | 0.773 | 0.850 |
| TSPO_NOV | 0.909 | 0.643 | 0.804 | 0.883 | 0.915 | 0.947 | 0.850 | 0.850 |

TABLE 17
DETAILS OF GENE EXPRESSION OMNIBUS
(GEO) DATASETS USED FOR DISCOVERY
OF VIRAL DERIVED BIOMARKERS

| Dataset | Description and Comparison Made |
|---|---|
| GSE40336 | Cytomegalovirus in humans (natural infection) |
| | Comparison of nonagenarians with a titer of 0 |
| | (n = 6) vs >20,000 (n = 67) Herpesviridae; |
| | Baltimore Group I |
| GSE41752 | Lassa virus in macaques (time course, challenge) |
| | Comparison of samples collected pre-challenge |
| | (n = 11) to those collected on Days 2, 3, and |
| | 6, post-challenge (n = 9) Arenaviridae; |
| | Baltimore Group V |
| GSE51808 | Dengue virus in humans (natural infection) |
| | Comparison of healthy controls (n = 9) vs |
| | samples collected at acute infection (n = 28) |
| | Flaviviridae; Baltimore Group IV |
| GSE52428 | Influenza virus (H1N1 & H3N2) (time course, |
| | challenge) Comparison of samples collected |
| | pre-challenge (n = 20) vs samples collected |
| | in the early stages of symptom development |
| | (before peak) (n = 62) Orthomyxoviridae; |
| | Baltimore Group V |

TABLE 18
DETAILS OF GENE EXPRESSION OMNIBUS
(GEO) DATASETS USED FOR VALIDATION
OF VIRAL DERIVED BIOMARKERS

| Dataset | Description and Comparison Made |
|---|---|
| GSE6269 | Influenza infection in humans (naturally acquired) |
| | Comparison of influenza A/B (n = 30/6) vs healthy |
| | (n = 6) Orthomyxoviridae; Baltimore Group V |
| GSE40396 | Adenovirus, Human Herpes Virus 6, Enterovirus and |
| | Rhinovirus in humans (pediatric, naturally |
| | acquired) Comparison of virus-infected (n = 35) vs |
| | virus-negative afebrile controls (n = 19) Adenoviridae; |
| | Baltimore Group I |
| GSE40012 | Influenza A infection in humans (naturally acquired) |
| | Comparison of influenza A infected (n = 39, up to five |
| | time points, 9 subjects) vs healthy controls (n = 36, |
| | two time points, 18 subjects) Orthomyxoviridae; |
| | Baltimore Group V |
| GSE18090 | Dengue fever in humans (naturally acquired) |
| | Comparison of febrile dengue fever (n = 18) vs |
| | febrile patients without dengue fever (n = 8) |
| | Flaviviridae; Baltimore Group IV |
| GSE30550 | Influenza A (H3N2) infection in humans (challenged) |
| | Comparison of all samples where symptoms reported |
| | (17 subjects) vs samples where no symptoms were |
| | reported Orthomyxoviridae; Baltimore Group V |
| GSE40224 | Hepatitis C virus infection in humans (naturally |
| | acquired) Comparison of infected (n = 10) vs |
| | healthy (n = 8) Flaviviridae; Baltimore Group IV |
| GSE5790 | Lymphocytic choriomeningitis virus infection in |
| | macaques (challenged) Comparison of samples taken |
| | pre-infection (n = 11) vs samples taken pre- and |
| | post-viremia with lethal dose (n = 8) |
| | Arenaviridae; Baltimore Group V |
| GSE34205 | Influenza A and Respiratory Syncytial Virus |
| | in humans (pediatric, naturally acquired) |
| | Comparison of infected (Influenza, n = 28; |
| | RSV, n = 51) vs healthy controls (n = 22) |
| | Orthomyxoviridae; Baltimore Group V |
| | Paramyxoviridae; Baltimore Group V |
| GSE5808 | Measles virus in humans (naturally acquired) |
| | Comparison of infected at hospital entry |
| | (n = 5) and healthy controls (n = 3) |
| | Paramyxoviridae; Baltimore Group V |
| GSE2729 | Rotavirus infection in humans (naturally |
| | acquired) Comparison of acute infection |
| | (n = 10) vs healthy controls (n = 8) |
| | Reoviridae; Baltimore Group III |
| GSE29429 | Human immunodeficiency virus infection |
| | in humans (naturally acquired) |
| | Comparison of acute infection at enrolment |
| | (African cohort, n = 17) vs matched |
| | uninfected controls (n = 30) |
| | Retroviridae; Baltimore Group VI |
| GSE14790 | Porcine circovirus in pigs (challenged) |
| | Comparison of pre-challenge (Day 0, n = 4) |
| | to post-challenge on Days 7, 14, 21 |
| | and 28 (n = 15) For performance |
| | calculations in this dataset N4BP1 was |
| | substituted for OASL since it is known |
| | that OASL does not exist in pigs Circoviridae; |
| | Baltimore Group II |
| GSE22160 | Hepatitis C and E in chimpanzees (challenged, |
| | liver biopsies) Comparison of pre-challenge |
| | samples (HCV, n = 3) (HEV, n = 4) to post- |
| | challenge samples over time. HCV: |
| | Flaviviridae, Baltimore Group IV HEV: |
| | Hepeviridae, Baltimore Group IV |
| GSE69606 | Respiratory Syncytial Virus in children |
| | Comparison of mild (n = 9), moderate (n = 9) and |
| | severe (n = 8) cases at presentation to |
| | recovery samples 4-6 weeks later (in |
| | moderate and severe cases). |
| | Paramyxoviridae, Baltimore Group V |
| GSE67059 | Rhinovirus in children |
| | Comparison of HRV− (n = 37) versus HRV+ |
| | asymptomatic (n = 14), HRV+ outpatients |
| | (n = 30), HRV+ inpatients (n = 70). |
| | Picornaviridae, Baltimore Group IV |
| GSE58287 | Marburg virus in Macaques |
| | Comparison of pre-inoculation samples (n = 3) |
| | to samples taken over five time |
| | points. Total samples = 15. |
| | Filoviridae, Baltimore Group V |

TABLE 19
DESCRIPTION OF CONTROL DATASETS
USED FOR SUBTRACTION FROM THE
DERIVED BIOMARKERS FOR VASIRS
The subtraction process ensured that the
VaSIRS derived biomarkers were specific.

| Dataset | Description and Comparison Made |
|---|---|
| GSE33341 | Bacterial sepsis in humans (natural infection) |
| | Comparison of healthy (n = 43) vs bacteremia (Staphylococcus aureus (n = 34), |
| | Escherichia coli (n = 15)) |
| GSE40366 | Age in humans (CMV titer = 0) |
| | Comparison of nonagenerians (n = 6) vs young (n = 11) (<28 years old) |
| GSE42834 | Multiple conditions in humans (naturally acquired) |
| | Comparison of controls (healthy, n = 147) vs tuberculosis (n = 66); sarcoidosis |
| | (active, n = 68; non-active n = 22); lung cancer (n = 16); bacterial pneumonia |
| | (treated and untreated with antibiotics) (n = 16) |
| GSE25504 | Bacterial sepsis in humans (neonates, naturally acquired). |
| | Comparison of controls (healthy and blood taken for other clinical reasons, |
| | n = 35) vs sepsis (n = 28) |
| GSE30119 | Bacterial sepsis in humans (naturally acquired) |
| | Comparison of controls (healthy, n = 44) vs sepsis (Staphylococcus aureus |
| | infection including bacteremia, n = 99) |
| GSE17755 | Autoimmune disease in humans |
| | Comparison of healthy (n = 53) vs autoimmune disease (rheumatoid arthritis, |
| | n = 112; Systemic Lupus Erythematosis, n = 22; Poly juvenile idiopathic arthritis, |
| | n = 6; Systemic juvenile idiopathic arthritis, n = 51) |
| GSE19301 | Asthma in humans (n = 117) |
| | Comparison of “quiet” (n = 292) vs “exacerbation” (n = 117) |
| GSE47655 | Anaphylaxis in humans (naturally acquired) |
| | Comparison of healthy (6 subjects, three time points, n = 18) vs anaphylaxis (6 |
| | patients, three time points, n = 18) |
| GSE38485 | Schizophrenia in humans |
| | Comparison of healthy (n = 22) vs schizophrenia (n = 15) |
| GSE36809 | Blunt trauma in humans |
| | Comparison of healthy (n = 37) vs trauma within 12 hours (n = 167) |
| GSE29532 | Coronary artery disease in humans, multiple time points. |
| | Comparison of controls (n = 6) vs CAD upon admission to ER (n = 49) |
| GSE46743 | Dexamethasone in human subjects (oral dose, induced) |
| | Comparison of pre-dose (n = 160) vs 3 hours post-dose (n = 160) |
| GSE61672 | Generalised anxiety disorder in humans |
| | Comparison of controls (n = 179) vs Patients on first visit (n = 157) |
| GSE64813 | Post-traumatic stress disorder in humans |
| | Comparison of 94 pre-deployment with 47 post-deployment with PTSD |
| GSE11908 | Multiple conditions in humans (naturally acquired) |
| | Comparison of healthy controls (n = 10) vs systemic juvenile idiopathic arthritis |
| | (n = 47); systemic lupus erythematosus (n = 40); type I diabetes (n = 20); |
| | metastatic melanoma (n = 39); Escherichia coli (n = 22); Staphylococcus aureus |
| | (n = 18); Liver-transplant recipients undergoing immunosuppressive therapy |
| | (n = 37) |
| GSE16129 | Staphylococcus aureus infection in humans (naturally acquired) |
| | Comparison of healthy control (n = 29) vs Staphylococcus aureus: (n = 97) |
| GSE40012 | SIRS in humans (naturally acquired) |
| | Comparison of healthy controls (n = 36, two time points, 18 subjects) vs SIRS |
| | (n = 40, multiple time points, 13 subjects) |
| GSE40396 | Bacterial infection in human (pediatric) (naturally acquired) |
| | Comparison of virus-negative afebrile controls (n = 19) vs culture positive |
| | Escherichia coli (n = 2) and Staphylococcus aureus (n = 4) |
| GSE6269 | Bacterial infection in human (pediatric) (naturally acquired) |
| | Comparison of healthy control (n = 6) vs Staphylococcus aureus (n = 50); |
| | Escherichia coli (n = 29); Streptococcus pneumoniae (n = 22) |
| GSE35846 | Race, gender and obesity in human subjects (mean age 51) |
| | Comparison of men (n = 69) vs women (n = 124) |
| | Comparison across race (Caucasian, n = 140; African American, n = 37; Asian, |
| | n = 11; American Indian, n = 1) |
| | Comparison across percentage body fat (9-53%) |

TABLE 20
LIST OF DERIVED VASIRS BIOMARKERS
WITH AN OF AUC >0.8 IN AT LEAST
11 OF 14 VIRAL DATASETS.

| Derived | Mean |
|---|---|
| Biomarker | AUC |
| IFI6:IL16 | 0.916 |
| OASL:NR3C1 | 0.915 |
| OASL:EMR2 | 0.914 |
| OASL:SORL1 | 0.908 |
| OASL:SERTAD2 | 0.907 |
| OASL:LPAR2 | 0.904 |
| OASL:ITGAX | 0.902 |
| OASL:TGFBR2 | 0.901 |
| OASL:KIAA0247 | 0.9 |
| OASL:ARHGAP26 | 0.899 |
| OASL:LYN | 0.899 |
| OASL:PCBP2 | 0.898 |
| OASL:TOPORS | 0.898 |
| EIF2AK2:IL16 | 0.896 |
| OASL:NCOA1 | 0.896 |
| OASL:PTGER4 | 0.896 |
| OASL:TLR2 | 0.895 |
| OASL:PACSIN2 | 0.894 |
| OASL:LILRA2 | 0.893 |
| OASL:PTPRE | 0.893 |
| OASL:RPS6KA1 | 0.893 |
| OASL:CASC3 | 0.892 |
| OASL:VEZF1 | 0.892 |
| OASL:CRLF3 | 0.891 |
| OASL:NDEL1 | 0.891 |
| OASL:RASSF2 | 0.891 |
| OASL:TLE4 | 0.891 |
| OASL:ADGRE5 | 0.89 |
| OASL:CEP68 | 0.89 |
| OASL:RXRA | 0.89 |
| OASL:SP3 | 0.89 |
| OASL:ABLIM1 | 0.889 |
| OASL:AOAH | 0.889 |
| OASL:MBP | 0.889 |
| OASL:NLRP1 | 0.889 |
| OASL:PBX3 | 0.889 |
| OASL:PTPN6 | 0.889 |
| OASL:RYBP | 0.889 |
| OASL:IL13RA1 | 0.888 |
| OASL:LCP2 | 0.888 |
| OASL:LRP10 | 0.888 |
| OASL:SYPL1 | 0.888 |
| OASL:VAMP3 | 0.888 |
| IFI44:LTB | 0.887 |
| OASL:ARHGEF2 | 0.887 |
| OASL:CTDSP2 | 0.887 |
| OASL:LST1 | 0.887 |
| OASL:MAPK1 | 0.887 |
| OASL:N4BP1 | 0.887 |
| OASL:STAT5B | 0.887 |
| IFI44:ABLIM1 | 0.886 |
| IFI44:IL6ST | 0.886 |
| OASL:BACH1 | 0.886 |
| OASL:KLF7 | 0.886 |
| OASL:PRMT2 | 0.886 |
| OASL:HCK | 0.885 |
| OASL:ITPKB | 0.885 |
| OASL:MAP4K4 | 0.885 |
| OASL:PPM1F | 0.885 |
| OASL:RAB14 | 0.885 |
| IFI6:ABLIM1 | 0.884 |
| OAS2:FAIM3 | 0.884 |
| OASL:ARHGAP25 | 0.884 |
| OASL:GNA12 | 0.884 |
| OASL:NUMB | 0.884 |
| OASL:CREBBP | 0.883 |
| OASL:PINK1 | 0.883 |
| OASL:PITPNA | 0.883 |
| OASL:SEMA4D | 0.883 |
| OASL:TGFBI | 0.883 |
| OASL:APLP2 | 0.882 |
| OASL:CCNG2 | 0.882 |
| OASL:MKRN1 | 0.882 |
| OASL:RGS14 | 0.882 |
| OASL:LYST | 0.881 |
| OASL:TNRC6B | 0.881 |
| OASL:TYROBP | 0.881 |
| OASL:WDR37 | 0.881 |
| OASL:WDR47 | 0.881 |
| UBE2L6:IL16 | 0.881 |
| OASL:BTG1 | 0.88 |
| OASL:CD93 | 0.88 |
| OASL:DCP2 | 0.88 |
| OASL:FYB | 0.88 |
| OASL:MAML1 | 0.88 |
| OASL:SNRK | 0.88 |
| OASL:USP4 | 0.88 |
| OASL:YTHDF3 | 0.88 |
| OASL:CEP170 | 0.879 |
| OASL:PLEKHO2 | 0.879 |
| OASL:SMAD4 | 0.879 |
| OASL:ST3GAL1 | 0.879 |
| OASL:ZNF292 | 0.879 |
| IFI44:IL4R | 0.878 |
| OASL:HPCAL1 | 0.878 |
| OASL:IGSF6 | 0.878 |
| OASL:MTMR3 | 0.878 |
| OASL:PHF20 | 0.878 |
| OASL:PPARD | 0.878 |
| OASL:PPP4R1 | 0.878 |
| OASL:RBMS1 | 0.878 |
| OASL:RHOG | 0.878 |
| OASL:TIAM1 | 0.878 |
| USP18:IL16 | 0.878 |
| OASL:CBX7 | 0.877 |
| OASL:RAF1 | 0.877 |
| OASL:SERINC5 | 0.877 |
| OASL:UBQLN2 | 0.877 |
| OASL:XPO6 | 0.877 |
| OASL:ATP6V1B2 | 0.876 |
| OASL:CSF2RB | 0.876 |
| OASL:GYPC | 0.876 |
| OASL:IL4R | 0.876 |
| OASL:MMP25 | 0.876 |
| OASL:PSEN1 | 0.876 |
| OASL:SH2B3 | 0.876 |
| OASL:STAT5A | 0.876 |
| ISG15:IL16 | 0.875 |
| MX1:LEF1 | 0.875 |
| OASL:CAMK2G | 0.875 |
| OASL:ETS2 | 0.875 |
| OASL:POLB | 0.875 |
| OASL:STK38L | 0.875 |
| OASL:TFE3 | 0.875 |
| OASL:ICAM3 | 0.874 |
| OASL:ITGB2 | 0.874 |
| OASL:PISD | 0.874 |
| OASL:PLXNC1 | 0.874 |
| OASL:SNX27 | 0.874 |
| OASL:TNIP1 | 0.874 |
| OASL:ZMIZ1 | 0.874 |
| OASL:FOXO3 | 0.873 |
| OASL:IL10RB | 0.873 |
| OASL:MAP3K5 | 0.873 |
| OASL:POLD4 | 0.873 |
| OASL:ARAP1 | 0.872 |
| OASL:CTBP2 | 0.872 |
| OASL:DGKA | 0.872 |
| OASL:NFYA | 0.872 |
| OASL:PCNX | 0.872 |
| OASL:PFDN5 | 0.872 |
| OASL:R3HDM2 | 0.872 |
| OASL:STX6 | 0.872 |
| EIF2AK2:SYPL1 | 0.871 |
| ISG15:ABLIM1 | 0.871 |
| OASL:FOXJ2 | 0.871 |
| OASL:IQSEC1 | 0.871 |
| OASL:LRMP | 0.871 |
| OASL:NAB1 | 0.871 |
| OASL:RAB31 | 0.871 |
| OASL:WASF2 | 0.871 |
| OASL:ZNF274 | 0.871 |
| OAS2:LEF1 | 0.87 |
| OASL:BRD1 | 0.87 |
| OASL:GNAQ | 0.87 |
| OASL:GSK3B | 0.87 |
| OASL:IL6R | 0.87 |
| OASL:MAPK14 | 0.87 |
| USP18:TGFBR2 | 0.87 |
| ISG15:LTB | 0.869 |
| OASL:INPP5D | 0.869 |
| OASL:MED13 | 0.869 |
| OASL:MORC3 | 0.869 |
| OASL:PTAFR | 0.869 |
| OASL:RBM23 | 0.869 |
| OASL:SNN | 0.869 |
| OASL:ST13 | 0.869 |
| OASL:TFEB | 0.869 |
| OASL:ZFYVE16 | 0.869 |
| EIF2AK2:SATB1 | 0.868 |
| OASL:ABAT | 0.868 |
| OASL:ABI1 | 0.868 |
| OASL:ACVR1B | 0.868 |
| OASL:GPSM3 | 0.868 |
| OASL:MPPE1 | 0.868 |
| OASL:PTEN | 0.868 |
| OASL:SEC62 | 0.868 |
| IFI6:MYC | 0.867 |
| IFI6:PCF11 | 0.867 |
| OASL:AIF1 | 0.867 |
| OASL:CSNK1D | 0.867 |
| OASL:GABARAP | 0.867 |
| OASL:HAL | 0.867 |
| OASL:LAPTM5 | 0.867 |
| OASL:XPC | 0.867 |
| USP18:NFKB1 | 0.867 |
| OASL:ACAP2 | 0.866 |
| OASL:CLEC4A | 0.866 |
| OASL:HIP1 | 0.866 |
| OASL:PIAS1 | 0.866 |
| OASL:PPP3R1 | 0.866 |
| OASL:RALB | 0.866 |
| OASL:RGS19 | 0.866 |
| OASL:TRIOBP | 0.866 |
| EIF2AK2:PDE3B | 0.865 |
| OASL:NCOA4 | 0.865 |
| OASL:RARA | 0.865 |
| OASL:RPS6KA3 | 0.865 |
| OASL:SIRPA | 0.865 |
| OASL:TLE3 | 0.865 |
| OASL:TNFRSF1A | 0.865 |
| DDX60:TGFBR2 | 0.864 |
| OASL:FLOT2 | 0.864 |
| OASL:FNBP1 | 0.864 |
| OASL:MAP3K3 | 0.864 |
| OASL:STX10 | 0.864 |
| OASL:ZDHHC18 | 0.864 |
| OASL:ZNF143 | 0.864 |
| TAP1:TGFBR2 | 0.864 |
| OAS2:ABLIM1 | 0.863 |
| OASL:ARRB2 | 0.863 |
| OASL:IKBKB | 0.863 |
| OASL:KBTBD2 | 0.863 |
| OASL:PHC2 | 0.863 |
| OASL:PUM2 | 0.863 |
| OASL:SSFA2 | 0.863 |
| IFI44:MYC | 0.862 |
| OASL:ABHD2 | 0.862 |
| OASL:CYLD | 0.862 |
| OASL:MAST3 | 0.862 |
| OASL:UBN1 | 0.862 |
| IFI6:IL6ST | 0.861 |
| IFIH1:TGFBR2 | 0.861 |
| OASL:CNPY3 | 0.861 |
| OASL:KIAA0232 | 0.861 |
| USP18:CHMP7 | 0.861 |
| USP18:NECAP2 | 0.861 |
| OASL:CAP1 | 0.86 |
| OASL:HPS1 | 0.86 |
| OASL:IL1RAP | 0.86 |
| OASL:MEF2A | 0.86 |
| OASL:RNF19B | 0.86 |
| OASL:TMEM127 | 0.86 |
| USP18:IL27RA | 0.86 |
| OASL:CDIPT | 0.859 |
| OASL:CREB1 | 0.859 |
| OASL:GPS2 | 0.859 |
| OASL:NDE1 | 0.859 |
| OASL:RAB11FIP1 | 0.859 |
| USP18:ABLIM1 | 0.859 |
| EIF2AK2:TNRC6B | 0.858 |
| OASL:FAM134A | 0.858 |
| OASL:FCGRT | 0.858 |
| OASL:LPIN2 | 0.858 |
| OASL:PECAM1 | 0.858 |
| OASL:WBP2 | 0.858 |
| OASL:ZNF148 | 0.858 |
| OASL:RTN3 | 0.857 |
| OASL:TYK2 | 0.857 |
| USP18:LTB | 0.857 |
| DHX58:IL16 | 0.856 |
| ISG15:IL4R | 0.856 |
| OASL:BRD4 | 0.856 |
| OASL:CCNT2 | 0.856 |
| OASL:FGR | 0.856 |
| OASL:ITSN2 | 0.856 |
| OASL:LYL1 | 0.856 |
| OASL:PHF3 | 0.856 |
| OASL:PSAP | 0.856 |
| OASL:STX3 | 0.856 |
| OASL:TNK2 | 0.856 |
| EIF2AK2:ZNF274 | 0.855 |
| OASL:ACAA1 | 0.855 |
| OASL:CHD3 | 0.855 |
| OASL:FRY | 0.855 |
| OASL:GRB2 | 0.855 |
| OASL:MAP3K11 | 0.855 |
| OASL:NEK7 | 0.855 |
| OASL:PPP2R5A | 0.855 |
| USP18:ST13 | 0.855 |
| XAF1:LEF1 | 0.855 |
| OASL:CASP8 | 0.854 |
| OASL:PCF11 | 0.854 |
| OASL:PRKCD | 0.854 |
| OASL:PSTPIP1 | 0.854 |
| OASL:SLCO3A1 | 0.854 |
| OASL:ZDHHC17 | 0.854 |
| USP18:FOXO1 | 0.854 |
| OASL:ASAP1 | 0.853 |
| OASL:BAZ2B | 0.853 |
| OASL:FAM65B | 0.853 |
| OASL:HHEX | 0.853 |
| OASL:MAX | 0.853 |
| OASL:PHF2 | 0.853 |
| OASL:RNF130 | 0.853 |
| OASL:SOS2 | 0.853 |
| OASL:STAM2 | 0.853 |
| OASL:ZFC3H1 | 0.853 |
| IFI44:CYLD | 0.852 |
| IFIH1:CRLF3 | 0.852 |
| OASL:BANP | 0.852 |
| OASL:CCND3 | 0.852 |
| OASL:DGCR2 | 0.852 |
| OASL:USP15 | 0.852 |
| USP18:EIF3H | 0.852 |
| OASL:LAT2 | 0.851 |
| OASL:ZYX | 0.851 |
| USP18:CAMK1D | 0.851 |
| ZBP1:NDE1 | 0.851 |
| EIF2AK2:IL4R | 0.85 |
| IFI44:SESN1 | 0.85 |
| OASL:CD37 | 0.85 |
| OASL:CST3 | 0.85 |
| OASL:DPEP2 | 0.85 |
| OASL:MYC | 0.85 |
| OASL:RERE | 0.85 |
| OASL:USP10 | 0.85 |
| USP18:LEF1 | 0.85 |
| OASL:MXI1 | 0.849 |
| OASL:PRUNE | 0.849 |
| OASL:VPS8 | 0.849 |
| OASL:CYTH4 | 0.848 |
| OASL:FBXO11 | 0.848 |
| OASL:PRKAA1 | 0.848 |
| OASL:SERINC3 | 0.848 |
| OASL:UBXN2B | 0.848 |
| USP18:DPF2 | 0.848 |
| USP18:NACA | 0.848 |
| USP18:SYPL1 | 0.848 |
| ISG15:DGKA | 0.847 |
| OASL:MARK3 | 0.847 |
| USP18:DIDO1 | 0.846 |
| CUL1:IL16 | 0.845 |
| OASL:DOCK9 | 0.845 |
| USP18:PIK3IP1 | 0.845 |
| OASL:FBXO9 | 0.844 |
| OASL:MKLN1 | 0.844 |
| OASL:PPP1R11 | 0.844 |
| USP18:DGKA | 0.844 |
| USP18:ZNF274 | 0.844 |
| OASL:POLR1D | 0.843 |
| OASL:SETD2 | 0.843 |
| DDX60:ABLIM1 | 0.842 |
| OASL:ARHGAP15 | 0.842 |
| OASL:BCL2 | 0.842 |
| OASL:GOLGA7 | 0.842 |
| OASL:KIAA0513 | 0.842 |
| OASL:MARCH7 | 0.842 |
| USP18:LDLRAP1 | 0.842 |
| C19orf66:IL16 | 0.841 |
| OASL:ARRB1 | 0.841 |
| OASL:BMP2K | 0.841 |
| OASL:LIMK2 | 0.841 |
| OASL:RNASET2 | 0.841 |
| USP18:ATM | 0.841 |
| USP18:CYLD | 0.841 |
| USP18:NOSIP | 0.841 |
| OASL:TNFSF13 | 0.84 |
| OASL:TRIM8 | 0.84 |
| XAF1:IL4R | 0.84 |
| DHX58:ABLIM1 | 0.839 |
| OASL:MANSC1 | 0.839 |
| OASL:MAP1LC3B | 0.839 |
| OASL:OSBPL2 | 0.839 |
| OASL:RAB7A | 0.839 |
| EIF2AK2:ZFC3H1 | 0.838 |
| IFIH1:LTB | 0.838 |
| OASL:FES | 0.838 |
| OASL:HGSNAT | 0.838 |
| OASL:KLF6 | 0.838 |
| OASL:TM2D3 | 0.838 |
| OASL:KLHL2 | 0.837 |
| OASL:MAPRE2 | 0.837 |
| OASL:RNF146 | 0.837 |
| USP18:RPL22 | 0.837 |
| DHX58:LTB | 0.836 |
| OASL:GMIP | 0.836 |
| DDX60:SYPL1 | 0.835 |
| EIF2AK2:IL6ST | 0.835 |
| EIF2AK2:PCF11 | 0.835 |
| ISG15:NOSIP | 0.835 |
| OASL:NRBF2 | 0.835 |
| OASL:RNF141 | 0.835 |
| OASL:VAV3 | 0.835 |
| OASL:ZFAND5 | 0.835 |
| USP18:NDFIP1 | 0.835 |
| USP18:TMEM204 | 0.835 |
| USP18:UBE2D2 | 0.835 |
| OASL:CAMK1D | 0.834 |
| OASL:CLK4 | 0.834 |
| OASL:MCTP2 | 0.834 |
| OASL:MOSPD2 | 0.834 |
| OASL:TSC22D3 | 0.834 |
| USP18:CRLF3 | 0.834 |
| USP18:SESN1 | 0.834 |
| USP18:ZC3HAV1 | 0.834 |
| OASL:MSL1 | 0.833 |
| OASL:TREM1 | 0.833 |
| OASL:YPEL5 | 0.833 |
| USP18:CIAPIN1 | 0.833 |
| USP18:PDCD6IP | 0.833 |
| HERC5:ABLIM1 | 0.832 |
| OASL:OSBPL11 | 0.832 |
| OASL:PLEKHO1 | 0.832 |
| USP18:CRTC3 | 0.832 |
| HERC6:ATM | 0.831 |
| ISG15:SESN1 | 0.831 |
| OAS2:MYC | 0.831 |
| OASL:OGFRL1 | 0.831 |
| OASL:ZXDC | 0.831 |
| USP18:CCR7 | 0.831 |
| OASL:APBB1IP | 0.83 |
| OASL:CHST11 | 0.83 |
| OASL:GPBP1L1 | 0.83 |
| USP18:SSBP2 | 0.83 |
| OASL:RC3H2 | 0.829 |
| USP18:UTP14A | 0.829 |
| OASL:GCC2 | 0.828 |
| USP18:LRMP | 0.828 |
| USP18:TRIB2 | 0.828 |
| OASL:GPR97 | 0.827 |
| EIF2AK2:BTG1 | 0.826 |
| EIF2AK2:CYLD | 0.826 |
| OASL:PAFAH1B1 | 0.826 |
| USP18:BTG1 | 0.826 |
| USP18:NCBP2 | 0.826 |
| USP18:PPP1R2 | 0.826 |
| LAP3:MAP4K4 | 0.825 |
| OASL:ERBB2IP | 0.825 |
| OASL:NOD2 | 0.825 |
| OASL:RIN3 | 0.825 |
| OASL:TMBIM1 | 0.825 |
| ZBP1:XPO6 | 0.825 |
| ISG15:LDLRAP1 | 0.824 |
| OASL:CHMP1B | 0.824 |
| OASL:LILRB3 | 0.824 |
| OASL:PHF20L1 | 0.823 |
| USP18:PCF11 | 0.823 |
| OASL:ANKRD49 | 0.822 |
| OASL:DOK3 | 0.822 |
| OASL:PRKAG2 | 0.822 |
| OASL:SOAT1 | 0.822 |
| USP18:IL6ST | 0.822 |
| USP18:RPL10A | 0.822 |
| LAP3:SYPL1 | 0.82 |
| OASL:MARCH8 | 0.819 |
| TAP1:TNRC6B | 0.819 |
| OASL:KLF3 | 0.818 |
| PHF11:ZNF274 | 0.818 |
| OASL:PGS1 | 0.817 |
| OASL:ZNF238 | 0.817 |
| STAT1:PCBP2 | 0.817 |
| OASL:SH2D3C | 0.816 |
| USP18:SAFB2 | 0.816 |
| EIF2AK2:CAMK1D | 0.815 |
| LAP3:CNPY3 | 0.815 |
| LAP3:NDFIP1 | 0.815 |
| LAP3:TRAK1 | 0.815 |
| OASL:NPL | 0.815 |
| OASL:NSUN3 | 0.815 |
| OASL:ATAD2B | 0.814 |
| ZBP1:KLF7 | 0.813 |
| ZBP1:PCF11 | 0.813 |
| LAP3:ABLIM1 | 0.812 |
| OASL:CSAD | 0.812 |
| PHF11:IL16 | 0.812 |
| USP18:BEX4 | 0.812 |
| USP18:METTL3 | 0.812 |
| RTP4:ABLIM1 | 0.811 |
| HERC6:MYC | 0.81 |
| USP18:ALDH3A2 | 0.81 |
| OASL:RAB4B | 0.809 |
| USP18:ATF7IP2 | 0.809 |
| TAP1:TGOLN2 | 0.807 |
| PARP12:ABLIM1 | 0.806 |
| RSAD2:CAMK1D | 0.806 |
| ZBP1:CYLD | 0.806 |
| STAT1:FBXO11 | 0.805 |
| ZBP1:ZFC3H1 | 0.805 |
| OASL:SIRPB1 | 0.804 |
| OASL:C2orf68 | 0.802 |
| RTP4:SYPL1 | 0.802 |
| LAP3:JAK1 | 0.801 |

TABLE 21
DETAILS OF GENE EXPRESSION OMNIBUS
(GEO) DATASETS USED FOR DISCOVERY
OF PROTOZOAL DERIVED BIOMARKER

| Dataset | Group | Case | Controls | Total # | Genes |
|---|---|---|---|---|---|
| GSE34404 | Malaria | 42 | 61 | 103 | 21511 |
| GSE64610 | Leishmania | 10 | 5 | 15 | 6805 |
| GSE15221 | Malaria | 14 | 14 | 28 | 36292 |
| GSE5418 | Malaria | 15 | 22 | 37 | 12439 |
| Merged Data | All | 86 | 107 | 193 | 4421 |

TABLE 22
DESCRIPTION OF THE GEO DATASETS USED FOR VALIDATION
OF THE PROTOZOAL DERIVED BIOMARKERS

| GEO | | | |
|---|---|---|---|
| Dataset | Organism | Tissue | Study Description |
| GSE43661 | Leishmania | Macrophages, | 3 donors, cultured cells either infected with |
| | major | in vitro | Leishmania or not. Samples taken at 0, 3, |
| | | | 6, 12 and 24 hours |
| GSE23750 | Entamoeba | Intestinal | 8 donors, samples taken on Day 1 and 60, |
| | histolytica | biopsies | pre- and post-treatment |
| GSE7047 | Trypanosoma | HeLa cells, | 3 replicates of cells either infected or not |
| | cruzi | in vitro | |
| GSE50957 | Plasmodium | Peripheral | Pilot study: 5 donors, samples taken pre- |
| | falciparum | blood | and post- being bitten by infected mosquitos. |
| | | | All donors were on chloroquin treatment |
| GSE52166 | Plasmodium | Peripheral | Large study, as per GSE50957 |
| | falciparum | blood | |

TABLE 23
DESCRIPTION OF CONTROL DATASETS
USED FOR SUBTRACTION FROM THE
DERIVED BIOMARKERS FOR PASIRS
The subtraction process ensured that the
PaSIRS derived biomarkers were specific.

| Dataset | Case | Controls | Total # | Genes | Response |
|---|---|---|---|---|---|
| GSE40366 | 69 | 17 | 86 | 20293 | Viral |
| GSE38485 | 106 | 96 | 202 | 19206 | SIRS |
| GSE46743 | 160 | 160 | 320 | 9595 | SIRS |
| GSE64813 | 47 | 141 | 188 | 10146 | SIRS |
| GSE17755 | 191 | 53 | 244 | 6620 | SIRS |
| GSE41752 | 19 | 11 | 30 | 18515 | Viral |
| GSE29532 | 25 | 6 | 31 | 14332 | SIRS |
| GSE51808 | 28 | 9 | 37 | 18353 | Viral |
| GSE19301 | 166 | 394 | 560 | 12631 | SIRS |
| GSE52428 | 41 | 39 | 80 | 12631 | Viral |
| GSE11908 | 40 | 196 | 236 | 12631 | Bacterial |
| GSE47655 | 1 | 35 | 36 | 5196 | SIRS |
| GSE25504 | 26 | 37 | 63 | 13510 | Bacterial |
| GSE61672 | 157 | 179 | 336 | 9291 | SIRS |
| GSE35846 | 124 | 65 | 189 | 10330 | Gender |
| GSE33341 | 51 | 43 | 94 | 12631 | Bacterial |

TABLE 24
DESCRIPTION OF DATASETS USED FOR
DISCOVERY, VALIDATION AND SUBTRACTION
FROM THE DERIVED BIOMARKERS FOR INSIRS.
The subtraction process ensured that the
InSIRS derived biomarkers were specific.

| Dataset | Description | How Used |
|---|---|---|
| GAPPSS | In-house clinical trial. Pediatric patients | Discovery/Validation |
| | in ICU. Post-surgical vs confirmed sepsis | |
| GSE17755 | Autoimmune disease vs infected | Discovery/Validation |
| GSE36809 | Trauma (non-infected early stage vs | Discovery/Validation |
| | infected) | |
| GSE47655 | Anaphylaxis (presentation vs resolved) | Discovery/Validation |
| GSE63990 | Acute respiratory inflammation | Discovery/Validation |
| | (infected vs non-infected) | |
| GSE74224 | Sepsis vs SIRS (in-house data) | Discovery/Validation |
| GSE11908 | Autoimmune disease, cancer, liver | Control/Subtraction |
| | cirrhosis vs infected | |
| GSE19301 | Asthma (exacerbation vs quiescent) | Control/Subtraction |
| GSE38485 | Schizophrenia vs healthy control | Control/Subtraction |
| GSE41752 | Lassa virus infection vs healthy | Control/Subtraction |
| GSE42834 | Tuberculosis vs sarcoidosis | Control/Subtraction |
| GSE51808 | Dengue virus vs healthy control | Control/Subtraction |
| GSE52428 | Influenza virus vs healthy control | Control/Subtraction |
| GSE61672 | Anxiety vs healthy control | Control/Subtraction |
| GSE64813 | Post-traumatic stress disorder vs | Control/Subtraction |
| | pre-stress | |

TABLE 25
DERIVED BIOMARKERS GROUPED (A, B, C, D) BASED ON
CORRELATION TO EACH OF THE BIOMARKERS IN THE
FINAL BASIRS SIGNATURE (OPLAH, ZHX2, TSPO, HCLS1)

| Group A | | | Group B | | | Group C | | | Group D | | |
|---|---|---|---|---|---|---|---|---|---|---|---|
| Corre- | | | Corre- | | | Corre- | | | Corre- | | |
| lation | HUGO | DNA | lation | HUGO | DNA | lation | HUGO | DNA | lation | HUGO | DNA |
| to | Gene | SEQ | to | Gene | SEQ | to | Gene | SEQ | to | Gene | SEQ |
| OPLAH | Symbol | ID | ZHX2 | Symbol | ID | TSPO | Symbol | ID | HCLS1 | Symbol | ID |
| 0.703 | ENTPD7 | 15 | 0.474 | SAP130 | 79 | 0.789 | HK3 | 29 | 0.490 | SEMA4D | 80 |
| 0.678 | PCOLCE2 | 59 | 0.468 | NLRP1 | 53 | 0.770 | RAB32 | 72 | 0.488 | INPP5D | 36 |
| 0.656 | ITGA7 | 37 | 0.440 | CNNM3 | 10 | 0.763 | IMPDH1 | 35 | 0.381 | ZFP36L2 | 93 |
| 0.611 | PDGFC | 60 | 0.427 | POGZ | 65 | 0.703 | FAM129A | 18 | 0.337 | CLEC7A | 9 |
| 0.590 | SMPDL3A | 82 | 0.387 | GRK5 | 26 | 0.661 | GAS7 | 24 | 0.321 | RNASE6 | 76 |
| 0.531 | GALNT2 | 23 | 0.375 | IL2RB | 34 | 0.622 | CD82 | 8 | 0.292 | MME | 50 |
| 0.465 | CR1 | 12 | 0.357 | NPAT | 56 | 0.599 | ADM | 2 | 0.291 | PARP8 | 58 |
| 0.458 | IGFBP7 | 31 | 0.352 | PRKD2 | 66 | 0.563 | IK | 32 | 0.242 | NCOA6 | 51 |
| 0.441 | FIG4 | 20 | 0.350 | FOXJ3 | 21 | 0.525 | ALPL | 3 | 0.127 | LPIN2 | 46 |
| 0.404 | COX15 | 11 | 0.335 | JARID2 | 38 | 0.519 | TLR5 | 88 | | | |
| 0.386 | NMUR1 | 54 | 0.323 | RBM23 | 74 | 0.484 | DENND3 | 13 | | | |
| 0.364 | MCTP1 | 48 | 0.318 | PRKDC | 67 | 0.470 | MGAM | 49 | | | |
| 0.348 | EPHB4 | 16 | 0.310 | TGFBR3 | 86 | 0.435 | TMEM165 | 89 | | | |
| 0.302 | ICK | 30 | 0.308 | SIDT1 | 81 | 0.409 | PRPF38B | 68 | | | |
| 0.218 | MBIP | 47 | 0.305 | TLE3 | 87 | 0.402 | EXTL3 | 17 | | | |
| 0.155 | PDS5B | 61 | 0.296 | QRICH1 | 71 | 0.352 | ADAM19 | 1 | | | |
| 0.082 | IKZF5 | 33 | 0.286 | KLRD1 | 42 | 0.335 | ST3GAL2 | 84 | | | |
| 0.046 | KIAA0101 | 39 | 0.267 | NFIC | 52 | 0.330 | CAMK1D | 4 | | | |
| | | | 0.265 | HAL | 27 | 0.310 | DOCK5 | 14 | | | |
| | | | 0.260 | RBM15 | 73 | 0.290 | GAB2 | 22 | | | |
| | | | 0.258 | KIAA0355 | 40 | 0.283 | CCNK | 7 | | | |
| | | | 0.255 | CBLL1 | 6 | | | | | | |
| | | | 0.251 | PYHIN1 | 70 | | | | | | |
| | | | 0.249 | KIAA0907 | 41 | | | | | | |
| | | | 0.217 | RFC1 | 75 | | | | | | |
| | | | 0.210 | KLRF1 | 43 | | | | | | |
| | | | 0.205 | SPIN1 | 83 | | | | | | |
| | | | 0.198 | PHF3 | 62 | | | | | | |
| | | | 0.196 | UTRN | 91 | | | | | | |
| | | | 0.190 | RUNX2 | 77 | | | | | | |
| | | | 0.184 | PRSS23 | 69 | | | | | | |
| | | | 0.178 | NOV | 55 | | | | | | |
| | | | 0.177 | RYK | 78 | | | | | | |
| | | | 0.176 | LEPROTL1 | 45 | | | | | | |
| | | | 0.174 | CASS4 | 5 | | | | | | |
| | | | 0.164 | GCC2 | 25 | | | | | | |
| | | | 0.146 | PLA2G7 | 64 | | | | | | |
| | | | 0.141 | FBXO28 | 19 | | | | | | |
| | | | 0.140 | YPEL1 | 92 | | | | | | |
| | | | 0.134 | PIK3C2A | 63 | | | | | | |
| | | | 0.133 | LAG3 | 44 | | | | | | |
| | | | 0.120 | SYTL2 | 85 | | | | | | |

TABLE 26
DERIVED BIOMARKERS GROUPED (A, B, C, D) BASED ON CORRELATION TO EACH OF THE
BIOMARKErS IN THE FINAL VASIRS SIGNATURE (ISG15, IL16, OASL ADGRE5)

| Group A | | | Group B | | | Group C | | | Group D | | |
|---|---|---|---|---|---|---|---|---|---|---|---|
| Corre- | | | Corre- | | | Corre- | | | Corre- | | |
| lation | HUGO | | lation | HUGO | | lation | HUGO | | lation | HUGO | |
| to | Gene | SEQ | to | Gene | SEQ | to | Gene | | to | Gene | |
| ISG15 | Name | ID | IL16 | Name | ID | OASL | Name | SEQID | ADGRE5 | Name | SEQID |
| 1.000 | ISG15 | 330 | 1.000 | IL16 | 322 | 1.000 | OASL | 415 | 1.000 | ADGRE5 | 237 |
| 0.915 | IFI44 | 315 | 0.661 | ITPKB | 333 | 0.529 | N4BP1 | 393 | 0.634 | CYTH4 | 261 |
| 0.915 | RSAD2 | 496 | 0.600 | CAMK2G | 226 | 0.460 | NOD2 | 407 | 0.599 | HCK | 306 |
| 0.913 | HERC5 | 307 | 0.567 | CTDSP2 | 258 | 0.455 | RNF19B | 491 | 0.582 | ARHGAP26 | 205 |
| 0.906 | MX1 | 390 | 0.555 | DPEP2 | 270 | 0.437 | PRKAG2 | 456 | 0.555 | RARA | 477 |
| 0.895 | HERC6 | 308 | 0.551 | LTB | 358 | 0.413 | IGSF6 | 318 | 0.547 | XPO6 | 584 |
| 0.894 | OA52 | 414 | 0.549 | CBX7 | 230 | 0.352 | MEF2A | 380 | 0.534 | TNFRSF1A | 550 |
| 0.894 | XAF1 | 582 | 0.535 | FNBP1 | 286 | 0.343 | LPIN2 | 354 | 0.527 | SLCO3A1 | 514 |
| 0.892 | IFI6 | 316 | 0.534 | FOXO1 | 288 | 0.341 | PPP1R11 | 450 | 0.526 | ICAM3 | 314 |
| 0.873 | PARP12 | 421 | 0.531 | MAST3 | 375 | 0.316 | USP15 | 570 | 0.521 | PTPN6 | 466 |
| 0.872 | EIF2AK2 | 272 | 0.529 | LDLRAP1 | 348 | 0.308 | BACH1 | 214 | 0.519 | PRKCD | 457 |
| 0.849 | DHX58 | 266 | 0.529 | TMEM204 | 549 | 0.307 | SSFA2 | 524 | 0.518 | RAB11FIP1 | 470 |
| 0.844 | UBE2L6 | 565 | 0.526 | FAIM3 | 277 | 0.299 | MKLN1 | 382 | 0.514 | CSF2RB | 254 |
| 0.838 | DDX60 | 263 | 0.516 | RGS14 | 483 | 0.270 | FYB | 291 | 0.512 | LCP2 | 347 |
| 0.819 | USP18 | 571 | 0.516 | IKBKB | 319 | 0.250 | NSUN3 | 412 | 0.509 | TYROBP | 563 |
| 0.817 | RTP4 | 498 | 0.516 | ZXDC | 600 | 0.232 | MAX | 376 | 0.499 | PHC2 | 431 |
| 0.815 | PHF11 | 432 | 0.508 | PHF20 | 434 | 0.218 | STAM2 | 527 | 0.496 | RHOG | 485 |
| 0.812 | IFIH1 | 317 | 0.507 | DGKA | 265 | 0.209 | HHEX | 310 | 0.496 | PSAP | 460 |
| 0.792 | ZBP1 | 587 | 0.501 | XPC | 583 | 0.207 | CLEC4A | 246 | 0.496 | LYN | 360 |
| 0.766 | STAT1 | 528 | 0.499 | PPARD | 448 | 0.197 | ZFAND5 | 592 | 0.494 | TMEM127 | 548 |
| 0.765 | LAP3 | 344 | 0.499 | C2orf68 | 224 | 0.188 | ABI1 | 191 | 0.492 | LILRA2 | 350 |
| 0.755 | TAP1 | 536 | 0.494 | NLRP1 | 406 | 0.144 | MORC3 | 385 | 0.485 | AOAH | 199 |
| 0.741 | C19orf66 | 223 | 0.488 | IL27RA | 324 | 0.142 | RC3H2 | 481 | 0.476 | FGR | 284 |
| 0.617 | CUL1 | 259 | 0.480 | ABLIM1 | 192 | 0.137 | MAP1LC3B | 364 | 0.470 | PLEKHO2 | 443 |
| 0.453 | POLB | 445 | 0.477 | JAK1 | 335 | 0.120 | TM2D3 | 546 | 0.470 | ARAP1 | 202 |
| 0.395 | ZC3HAV1 | 589 | 0.475 | METTL3 | 381 | 0.100 | CHST11 | 244 | 0.468 | RBM23 | 479 |
| | | | 0.474 | SAFB2 | 501 | 0.097 | NAB1 | 394 | 0.462 | PTPRE | 467 |
| | | | 0.474 | PPM1F | 449 | 0.014 | KLF3 | 340 | 0.459 | KLF6 | 341 |
| | | | 0.473 | TYK2 | 562 | −0.030 | YPEL5 | 585 | 0.458 | LIMK2 | 352 |
| | | | 0.471 | BANP | 215 | −0.063 | MXI1 | 391 | 0.456 | LILRB3 | 351 |
| | | | 0.470 | CRTC3 | 252 | | | | 0.454 | TLR2 | 545 |
| | | | 0.468 | ATM | 212 | | | | 0.451 | GPR97 | 299 |
| | | | 0.453 | PAFAH1B1 | 420 | | | | 0.451 | GMIP | 294 |
| | | | 0.447 | PIK3IP1 | 438 | | | | 0.446 | SIRPA | 512 |
| | | | 0.445 | WDR37 | 580 | | | | 0.444 | LRP10 | 356 |
| | | | 0.444 | TGFBR2 | 540 | | | | 0.444 | LPAR2 | 353 |
| | | | 0.442 | ZNF274 | 598 | | | | 0.442 | TREM1 | 557 |
| | | | 0.429 | STAT5B | 530 | | | | 0.441 | IL13RA1 | 321 |
| | | | 0.427 | MAML1 | 362 | | | | 0.439 | ITGAX | 331 |
| | | | 0.420 | SATB1 | 502 | | | | 0.435 | ARHGAP25 | 204 |
| | | | 0.419 | DOCK9 | 268 | | | | 0.433 | SIRPB1 | 513 |
| | | | 0.417 | CHMP7 | 243 | | | | 0.433 | ZDHHC18 | 591 |
| | | | 0.413 | BRD1 | 220 | | | | 0.433 | TLE3 | 543 |
| | | | 0.410 | BTG1 | 222 | | | | 0.432 | ITGB2 | 332 |
| | | | 0.408 | ATF7IP2 | 211 | | | | 0.432 | SNX27 | 518 |
| | | | 0.408 | DIDO1 | 267 | | | | 0.431 | PGS1 | 430 |
| | | | 0.407 | LEF1 | 349 | | | | 0.429 | ATP6V1B2 | 213 |
| | | | 0.407 | TNRC6B | 554 | | | | 0.428 | RAB31 | 472 |
| | | | 0.405 | SERTAD2 | 507 | | | | 0.427 | MAP3K11 | 365 |
| | | | 0.405 | CEP68 | 240 | | | | 0.427 | PACSIN2 | 419 |
| | | | 0.398 | BCL2 | 217 | | | | 0.427 | KIAA0513 | 339 |
| | | | 0.397 | VPS8 | 577 | | | | 0.426 | EMR2 | 274 |
| | | | 0.396 | CHD3 | 241 | | | | 0.426 | RERE | 482 |
| | | | 0.393 | PUM2 | 468 | | | | 0.426 | NUMB | 413 |
| | | | 0.390 | TGOLN2 | 541 | | | | 0.425 | RALB | 476 |
| | | | 0.383 | NDE1 | 399 | | | | 0.425 | ETS2 | 276 |
| | | | 0.382 | CCR7 | 234 | | | | 0.422 | STAT5A | 529 |
| | | | 0.381 | PSTPIP1 | 462 | | | | 0.421 | LST1 | 357 |
| | | | 0.379 | TIAM1 | 542 | | | | 0.417 | RIN3 | 486 |
| | | | 0.376 | PECAM1 | 428 | | | | 0.417 | TNK2 | 553 |
| | | | 0.374 | PDE3B | 427 | | | | 0.416 | IQSEC1 | 329 |
| | | | 0.374 | MYC | 392 | | | | 0.413 | PISD | 440 |
| | | | 0.371 | FOXJ2 | 287 | | | | 0.412 | SORL1 | 520 |
| | | | 0.370 | PRMT2 | 458 | | | | 0.412 | FES | 283 |
| | | | 0.370 | CSNK1D | 255 | | | | 0.411 | K1AA0247 | 338 |
| | | | 0.357 | RPL10A | 492 | | | | 0.404 | IL6R | 326 |
| | | | 0.356 | SERINC5 | 506 | | | | 0.404 | LAPTM5 | 345 |
| | | | 0.354 | ARHGEF2 | 206 | | | | 0.402 | VAMP3 | 574 |
| | | | 0.352 | HGSNAT | 309 | | | | 0.400 | FAM65B | 279 |
| | | | 0.350 | TRAK1 | 556 | | | | 0.398 | MAP3K5 | 367 |
| | | | 0.350 | PHF2 | 433 | | | | 0.396 | TRIM8 | 559 |
| | | | 0.349 | PBX3 | 422 | | | | 0.396 | ZYX | 601 |
| | | | 0.349 | SESN1 | 508 | | | | 0.388 | MAPK14 | 370 |
| | | | 0.341 | DPF2 | 271 | | | | 0.387 | PLEKHO1 | 442 |
| | | | 0.338 | IL4R | 325 | | | | 0.387 | NCOA1 | 397 |
| | | | 0.334 | NOSIP | 408 | | | | 0.384 | RNASET2 | 487 |
| | | | 0.331 | MPPE1 | 387 | | | | 0.383 | APBB1IP | 200 |
| | | | 0.321 | NR3C1 | 410 | | | | 0.381 | RXRA | 499 |
| | | | 0.320 | ABAT | 189 | | | | 0.375 | PTAFR | 463 |
| | | | 0.320 | GCC2 | 293 | | | | 0.373 | CNPY3 | 248 |
| | | | 0.316 | ZFC3H1 | 593 | | | | 0.373 | TNFSF13 | 551 |
| | | | 0.311 | SETD2 | 509 | | | | 0.368 | RPS6KA1 | 494 |
| | | | 0.308 | ITSN2 | 334 | | | | 0.367 | OSBPL2 | 418 |
| | | | 0.306 | R3HDM2 | 469 | | | | 0.367 | MTMR3 | 389 |
| | | | 0.302 | ARHGAP15 | 203 | | | | 0.362 | TMBIM1 | 547 |
| | | | 0.301 | PCF11 | 424 | | | | 0.359 | TFEB | 538 |
| | | | 0.301 | MAPRE2 | 371 | | | | 0.359 | TFE3 | 537 |
| | | | 0.299 | ST3GAL1 | 526 | | | | 0.358 | RAF1 | 475 |
| | | | 0.299 | NACA | 395 | | | | 0.357 | STX3 | 533 |
| | | | 0.299 | WDR47 | 581 | | | | 0.357 | LAT2 | 346 |
| | | | 0.298 | SSBP2 | 523 | | | | 0.356 | GRB2 | 302 |
| | | | 0.293 | CLK4 | 247 | | | | 0.355 | NDEL1 | 400 |
| | | | 0.289 | EIF3H | 273 | | | | 0.355 | SEMA4D | 504 |
| | | | 0.287 | FRY | 290 | | | | 0.353 | FCGRT | 282 |
| | | | 0.286 | ZNF238 | 597 | | | | 0.353 | DOK3 | 269 |
| | | | 0.286 | PTGER4 | 465 | | | | 0.353 | HIP1 | 311 |
| | | | 0.285 | PCNX | 425 | | | | 0.353 | UBN1 | 566 |
| | | | 0.283 | NECAP2 | 402 | | | | 0.352 | PLXNC1 | 444 |
| | | | 0.279 | CASC3 | 228 | | | | 0.351 | NRBF2 | 411 |
| | | | 0.279 | MSL1 | 388 | | | | 0.348 | INPP5D | 328 |
| | | | 0.278 | VEZF1 | 576 | | | | 0.347 | SH2D3C | 511 |
| | | | 0.275 | K1AA0232 | 337 | | | | 0.347 | MMP25 | 384 |
| | | | 0.274 | RASSF2 | 478 | | | | 0.342 | IL10RB | 320 |
| | | | 0.268 | RPL22 | 493 | | | | 0.340 | FLOT2 | 285 |
| | | | 0.265 | ACAA1 | 193 | | | | 0.339 | PIAS1 | 437 |
| | | | 0.263 | MAP4K4 | 368 | | | | 0.338 | PITPNA | 441 |
| | | | 0.263 | BEX4 | 218 | | | | 0.334 | APLP2 | 201 |
| | | | 0.263 | NCBP2 | 396 | | | | 0.333 | CTBP2 | 257 |
| | | | 0.262 | LRMP | 355 | | | | 0.332 | GPSM3 | 301 |
| | | | 0.259 | CAMK1D | 225 | | | | 0.331 | RNF130 | 488 |
| | | | 0.257 | UTP14A | 573 | | | | 0.326 | DGCR2 | 264 |
| | | | 0.253 | STX6 | 534 | | | | 0.326 | ZMIZ1 | 595 |
| | | | 0.253 | RPS6KA3 | 495 | | | | 0.320 | CAP1 | 227 |
| | | | 0.249 | PRKAA1 | 455 | | | | 0.319 | GSK3B | 303 |
| | | | 0.240 | GOLGA7 | 297 | | | | 0.318 | RGS19 | 484 |
| | | | 0.239 | ZNF143 | 596 | | | | 0.317 | RAB7A | 474 |
| | | | 0.237 | SNRK | 517 | | | | 0.316 | CREBBP | 250 |
| | | | 0.233 | SYPL1 | 535 | | | | 0.313 | RBMS1 | 480 |
| | | | 0.229 | CYLD | 260 | | | | 0.310 | IL1RAP | 323 |
| | | | 0.228 | PRUNE | 459 | | | | 0.308 | RTN3 | 497 |
| | | | 0.224 | CRLF3 | 251 | | | | 0.308 | PPP4R1 | 454 |
| | | | 0.223 | CD93 | 236 | | | | 0.307 | TRIOBP | 560 |
| | | | 0.223 | GPS2 | 300 | | | | 0.306 | GABARAP | 292 |
| | | | 0.221 | FBXO11 | 280 | | | | 0.305 | MCTP2 | 378 |
| | | | 0.217 | UBE2D2 | 564 | | | | 0.304 | NFKB1 | 404 |
| | | | 0.217 | USP10 | 569 | | | | 0.303 | CST3 | 256 |
| | | | 0.216 | CCNG2 | 232 | | | | 0.292 | ABHD2 | 190 |
| | | | 0.212 | S0S2 | 521 | | | | 0.285 | SH2B3 | 510 |
| | | | 0.211 | ARRB1 | 207 | | | | 0.284 | STX10 | 532 |
| | | | 0.207 | CEP170 | 239 | | | | 0.282 | TSC22D3 | 561 |
| | | | 0.206 | SMAD4 | 515 | | | | 0.280 | TLE4 | 544 |
| | | | 0.205 | CIAPIN1 | 245 | | | | 0.277 | HAL | 305 |
| | | | 0.204 | KLF7 | 342 | | | | 0.277 | ARRB2 | 208 |
| | | | 0.198 | PHF20L1 | 435 | | | | 0.276 | MAP3K3 | 366 |
| | | | 0.194 | ALDH3A2 | 197 | | | | 0.274 | NPL | 409 |
| | | | 0.193 | PDCD6IP | 426 | | | | 0.265 | CCND3 | 231 |
| | | | 0.185 | WASF2 | 578 | | | | 0.265 | SERINC3 | 505 |
| | | | 0.184 | TGFBI | 539 | | | | 0.263 | GNAQ | 296 |
| | | | 0.175 | GPBP1L1 | 298 | | | | 0.262 | USP4 | 572 |
| | | | 0.174 | PCBP2 | 423 | | | | 0.261 | PSEN1 | 461 |
| | | | 0.166 | DCP2 | 262 | | | | 0.256 | KBTBD2 | 336 |
| | | | 0.165 | LYST | 361 | | | | 0.254 | LYL1 | 359 |
| | | | 0.154 | ERBB2IP | 275 | | | | 0.241 | AIF1 | 196 |
| | | | 0.146 | ANKRD49 | 198 | | | | 0.239 | MBP | 377 |
| | | | 0.145 | NDFIP1 | 401 | | | | 0.238 | ACVR1B | 195 |
| | | | 0.141 | ATAD2B | 210 | | | | 0.238 | RAB4B | 473 |
| | | | 0.138 | ZNF292 | 599 | | | | 0.232 | PTEN | 464 |
| | | | 0.137 | CCNT2 | 233 | | | | 0.231 | ASAP1 | 209 |
| | | | 0.134 | MARCH7 | 372 | | | | 0.231 | MANSC1 | 363 |
| | | | 0.133 | ACAP2 | 194 | | | | 0.228 | RYBP | 500 |
| | | | 0.132 | MED13 | 379 | | | | 0.225 | CSAD | 253 |
| | | | 0.131 | IL6ST | 327 | | | | 0.223 | UBXN2B | 568 |
| | | | 0.131 | PHF3 | 436 | | | | 0.223 | TNIP1 | 552 |
| | | | 0.129 | SP3 | 522 | | | | 0.222 | WBP2 | 579 |
| | | | 0.110 | SEC62 | 503 | | | | 0.211 | OGFRL1 | 416 |
| | | | 0.098 | ZFYVE16 | 594 | | | | 0.209 | SNN | 516 |
| | | | 0.095 | NEK7 | 403 | | | | 0.205 | HPCAL1 | 312 |
| | | | 0.094 | POLD4 | 446 | | | | 0.196 | CD37 | 235 |
| | | | 0.091 | GNA12 | 295 | | | | 0.194 | RNF146 | 490 |
| | | | 0.087 | TRIB2 | 558 | | | | 0.184 | RAB14 | 471 |
| | | | 0.086 | YTHDF3 | 586 | | | | 0.177 | TOPORS | 555 |
| | | | 0.082 | PPP2R5A | 452 | | | | 0.176 | NFYA | 405 |
| | | | 0.081 | PPP1R2 | 451 | | | | 0.172 | FOXO3 | 289 |
| | | | 0.076 | ZDHHC17 | 590 | | | | 0.171 | CREB1 | 249 |
| | | | 0.060 | STK38L | 531 | | | | 0.170 | MAPK1 | 369 |
| | | | 0.057 | ST13 | 525 | | | | 0.170 | SOAT1 | 519 |
| | | | 0.046 | FAM134A | 278 | | | | 0.168 | UBQLN2 | 567 |
| | | | 0.022 | PFDN5 | 429 | | | | 0.166 | OSBPL11 | 417 |
| | | | 0.015 | MARCH8 | 373 | | | | 0.165 | KLHL2 | 343 |
| | | | −0.041 | POLR1D | 447 | | | | 0.153 | VAV3 | 575 |
| | | | | | | | | | 0.135 | BRD4 | 221 |
| | | | | | | | | | 0.130 | MARK3 | 374 |
| | | | | | | | | | 0.114 | BAZ2B | 216 |
| | | | | | | | | | 0.112 | ZNF148 | 597 |
| | | | | | | | | | 0.110 | CASP8 | 229 |
| | | | | | | | | | 0.108 | CHMP1B | 242 |
| | | | | | | | | | 0.105 | HPS1 | 313 |
| | | | | | | | | | 0.099 | RNF141 | 489 |
| | | | | | | | | | 0.096 | MOSPD2 | 386 |
| | | | | | | | | | 0.081 | PINK1 | 439 |
| | | | | | | | | | 0.080 | CDIPT | 238 |
| | | | | | | | | | 0.060 | NCOA4 | 398 |
| | | | | | | | | | 0.059 | PPP3R1 | 453 |
| | | | | | | | | | 0.014 | MKRN1 | 383 |
| | | | | | | | | | 0.005 | GYPC | 304 |
| | | | | | | | | | −0.021 | BMP2K | 219 |
| | | | | | | | | | −0.058 | FBXO9 | 281 |

TABLE 27
DERIVED BIOMARKERS GROUPED (A, B, C, D) BASED ON CORRELATION TO EACH OF THE BIOMARKERS IN THE FINAL PASIRS SIGNATURE (TTC17, G6PD, HERC6, LAP3, NUP160, TPP1)

| Group A | | | Group B | | | Group C | | | Group D | | | Group E | | | Group F | | |
|---|---|---|---|---|---|---|---|---|---|---|---|---|---|---|---|---|---|
| Correlation | HUGO | DNA | Correlation | HUGO | DNA | Correlation | HUGO | DNA | Correlation | HUGO | DNA | Correlation | HUGO | DNA | Correlation | HUGO | DNA |
| to | Gene | SEQ | to | Gene | SEQ | to | Gene | SEQ | to | Gene | SEQ | to | Gene | SEQ | to | Gene | SEQ |
| TTC17 | Symbol | ID | G6PD | Symbol | ID | HERC6 | Symbol | ID | LAP3 | Symbol | ID | NUP160 | Symbol | ID | TPP1 | Symbol | ID |
| 1 | TTC17 | 1132 | 1 | G6PD | 1057 | 1 | HERC6 | 1063 | 1 | LAP3 | 1071 | 1 | NUP160 | 1082 | 1 | TPP1 | 1125 |
| 0.647 | ZMYND11 | 1142 | 0.723 | SP11 | 1112 | 0.408 | SETX | 1107 | 0.889 | WARS | 1139 | 0.736 | TOP2B | 1124 | 0.634 | WAS | 1140 |
| 0.574 | ASXL2 | 1022 | 0.692 | PGD | 1086 | 0.241 | HLA- | 1064 | 0.845 | UBE2L6 | 1134 | 0.686 | METAP1 | 1074 | 0.630 | RTN4 | 1102 |
| | | | | | | | DPA1 | | | | | | | | | | |
| 0.570 | ARID1A | 1020 | 0.682 | GRINA | 1061 | | | | 0.801 | TAP1 | 1117 | 0.653 | ZBED5 | 1141 | 0.562 | ATP6V1B2 | 1025 |
| 0.560 | CEP192 | 1037 | 0.679 | CD63 | 1035 | | | | 0.797 | SQRDL | 1113 | 0.626 | FNTA | 1056 | 0.528 | TIMP2 | 1120 |
| 0.551 | PCID2 | 1084 | 0.663 | FGR | 1053 | | | | 0.782 | POMP | 1089 | 0.624 | TRIT1 | 1128 | 0.482 | FLII | 1054 |
| 0.534 | BCL11A | 1026 | 0.657 | TCIRG1 | 1119 | | | | 0.781 | PLSCR1 | 1088 | 0.611 | ZNF266 | 1143 | 0.481 | RAB7A | 1093 |
| 0.534 | ARIH2 | 1021 | 0.642 | NUMB | 1081 | | | | 0.706 | MYD88 | 1077 | 0.604 | EXOSC10 | 1047 | | | |
| 0.524 | ARHGAP17 | 1019 | 0.618 | PRKCD | 1091 | | | | 0.701 | ATOX1 | 1023 | 0.598 | APEX1 | 1018 | | | |
| 0.504 | EXOSC2 | 1048 | 0.607 | TSPO | 1131 | | | | 0.694 | SH3GLB1 | 1108 | 0.595 | SERBP1 | 1104 | | | |
| 0.465 | TCF4 | 1118 | 0.570 | BCL3 | 1027 | | | | 0.678 | CEBPB | 1036 | 0.555 | TRAF3IP3 | 1126 | | | |
| 0.460 | RPL15 | 1097 | 0.569 | JUNB | 1069 | | | | 0.675 | SERPINB1 | 1105 | 0.552 | MLLT10 | 1076 | | | |
| 0.459 | GLG1 | 1058 | 0.553 | BCL6 | 1028 | | | | 0.674 | FCER1G | 1052 | 0.537 | IMP3 | 1066 | | | |
| 0.452 | CSNK1G2 | 1041 | 0.551 | TNIP1 | 1123 | | | | 0.671 | RALB | 1094 | 0.533 | ADSL | 1016 | | | |
| 0.445 | SUCLG2 | 1115 | 0.550 | ENO1 | 1044 | | | | 0.661 | IRF1 | 1067 | 0.533 | MGEA5 | 1075 | | | |
| 0.444 | LY9 | 1073 | 0.536 | FLOT1 | 1055 | | | | 0.658 | GNG5 | 1059 | 0.525 | NOSIP | 1080 | | | |
| 0.442 | USP34 | 1137 | 0.514 | PLAUR | 1087 | | | | 0.655 | TANK | 1116 | 0.522 | SEH1L | 1103 | | | |
| 0.416 | ADK | 1015 | 0.491 | PCBP1 | 1083 | | | | 0.651 | VAMP3 | 1138 | 0.521 | PREPL | 1090 | | | |
| 0.411 | CNOT7 | 1040 | 0.476 | GPI | 1060 | | | | 0.626 | LDHA | 1072 | 0.478 | FBXO11 | 1051 | | | |
| 0.410 | UFM1 | 1135 | 0.424 | NFKBIA | 1079 | | | | 0.617 | UPP1 | 1136 | 0.477 | CAMK2G | 1030 | | | |
| 0.403 | AHCTF1 | 1017 | 0.422 | CCND3 | 1031 | | | | 0.612 | HCK | 1062 | 0.476 | TMEM50B | 1122 | | | |
| 0.372 | TROVE2 | 1129 | | | | | | | 0.607 | NFIL3 | 1078 | 0.470 | RPS4X | 1101 | | | |
| 0.364 | CLIP4 | 1039 | | | | | | | 0.605 | SLAMF7 | 1109 | 0.466 | RPL9 | 1099 | | | |
| 0.350 | CD52 | 1033 | | | | | | | 0.593 | ACSL4 | 1014 | 0.463 | RPL22 | 1098 | | | |
| 0.326 | SERTAD2 | 1106 | | | | | | | 0.592 | ERLIN1 | 1045 | 0.457 | FBL | 1050 | | | |
| 0.323 | IRF8 | 1068 | | | | | | | 0.584 | RBMS1 | 1095 | 0.438 | CCR7 | 1032 | | | |
| 0.234 | CHN2 | 1038 | | | | | | | 0.581 | STAT3 | 1114 | 0.412 | IL10RA | 1065 | | | |
| | | | | | | | | | 0.572 | TRIB1 | 1127 | 0.403 | DNAJC10 | 1043 | | | |
| | | | | | | | | | 0.570 | C3AR1 | 1029 | 0.384 | RPS14 | 1100 | | | |
| | | | | | | | | | 0.560 | ATP2A2 | 1024 | 0.371 | EXOSC9 | 1049 | | | |
| | | | | | | | | | 0.546 | SOCS3 | 1110 | 0.367 | TMEM106B | 1121 | | | |
| | | | | | | | | | 0.545 | RIT1 | 1096 | | | | | | |
| | | | | | | | | | 0.538 | SORT1 | 1111 | | | | | | |
| | | | | | | | | | 0.538 | RAB27A | 1092 | | | | | | |
| | | | | | | | | | 0.536 | ETV6 | 1046 | | | | | | |
| | | | | | | | | | 0.529 | TUBA1B | 1133 | | | | | | |
| | | | | | | | | | 0.499 | PCMT1 | 1085 | | | | | | |
| | | | | | | | | | 0.486 | CD55 | 1034 | | | | | | |
| | | | | | | | | | 0.476 | CSTB | 1042 | | | | | | |
| | | | | | | | | | 0.424 | TRPC4AP | 1130 | | | | | | |
| | | | | | | | | | 0.389 | KIF1B | 1070 | | | | | | |

TABLE 28
DERIVED BIOMARKERS GROUPED (A, B, C, D) BASED ON CORRELATION TO EACH OF THE BIOMARKERS
IN THE FINAL INSIRS SIGNATURE (ARL6IP5, ENTPD1, HEATR1, TNFSF8

| Group A | | | Group B | | | Group C | | | Group D | | |
|---|---|---|---|---|---|---|---|---|---|---|---|
| Correlation | HUGO | DNA | Correlation | HUGO | DNA | Correlation | HUGO | DNA | Correlation | HUGO | DNA |
| to | Gene | SEQ | to | Gene | SEQ | to | Gene | SEQ | to | Gene | SEQ |
| ARL6IP5 | Name | ID | ENTPD1 | Name | ID | HEATR1 | Name | ID | TNFSF8 | Name | ID |
| 0.902 | MACF1 | 1343 | 0.957 | KCMF1 | 1334 | 0.974 | BCKDHB | 1286 | 0.867 | KLHL24 | 1337 |
| 0.884 | EFHD2 | 1306 | 0.949 | IQSEC1 | 1333 | 0.974 | CLOCK | 1299 | 0.858 | RBM26 | 1377 |
| 0.850 | TIA1 | 1405 | 0.943 | SLCO3A1 | 1392 | 0.972 | MY09A | 1353 | 0.832 | SUPT7L | 1396 |
| 0.847 | FCF1 | 1316 | 0.930 | GAB2 | 1319 | 0.971 | XPO4 | 1419 | 0.829 | SYNE2 | 1397 |
| 0.831 | THOC2 | 1404 | 0.925 | STK17B | 1395 | 0.965 | HLTF | 1326 | 0.826 | RABGAP1L | 1375 |
| 0.814 | MDH1 | 1345 | 0.919 | HEBP2 | 1324 | 0.964 | SLC35D1 | 1391 | 0.825 | PLCL2 | 1366 |
| 0.775 | ADSL | 1276 | 0.916 | BTN2A1 | 1288 | 0.961 | CDK6 | 1295 | 0.822 | ATXN3 | 1285 |
| 0.704 | SIDT2 | 1389 | 0.916 | CDKN1B | 1296 | 0.961 | VPS13A | 1415 | 0.807 | KIAA0391 | 1335 |
| | | | 0.910 | EXOC7 | 1313 | 0.960 | ANK3 | 1279 | 0.783 | NGDN | 1357 |
| | | | 0.904 | MXD1 | 1351 | 0.960 | PRKAB2 | 1368 | 0.764 | TRAPPC2 | 1409 |
| | | | 0.891 | IGF2R | 1329 | 0.957 | LANCL1 | 1339 | 0.763 | FUT8 | 1317 |
| | | | 0.888 | ADAM19 | 1274 | 0.956 | IDE | 1328 | 0.761 | G3BP1 | 1318 |
| | | | 0.887 | VNN3 | 1414 | 0.955 | LARP4 | 1341 | 0.757 | VPS13C | 1417 |
| | | | 0.882 | TFIP11 | 1402 | 0.955 | NEK1 | 1355 | 0.754 | TMEM87A | 1407 |
| | | | 0.880 | POLR2A | 1367 | 0.953 | SLC35A3 | 1390 | 0.740 | PWP1 | 1373 |
| | | | 0.876 | HAL | 1322 | 0.951 | RAB11FIP2 | 1374 | 0.732 | CD28 | 1291 |
| | | | 0.869 | MYH9 | 1352 | 0.951 | DIAPH2 | 1305 | | | |
| | | | 0.850 | PELI1 | 1363 | 0.945 | KLHL20 | 1336 | | | |
| | | | 0.839 | ARHGEF6 | 1281 | 0.944 | TBCE | 1399 | | | |
| | | | 0.827 | CLEC4E | 1298 | 0.944 | TGS1 | 1403 | | | |
| | | | 0.822 | TTC17 | 1411 | 0.942 | ADRBK2 | 1275 | | | |
| | | | 0.819 | RGS2 | 1382 | 0.942 | TTC27 | 1412 | | | |
| | | | 0.811 | EXTL3 | 1314 | 0.942 | AGPAT5 | 1278 | | | |
| | | | 0.809 | CDA | 1294 | 0.941 | TCF12 | 1400 | | | |
| | | | 0.805 | NOTCH2 | 1361 | 0.939 | BRCC3 | 1287 | | | |
| | | | 0.804 | RCBTB2 | 1378 | 0.935 | YTHDC2 | 1421 | | | |
| | | | 0.799 | CYP4F3 | 1303 | 0.934 | ZMYND11 | 1422 | | | |
| | | | 0.786 | RRAGC | 1387 | 0.934 | NOL10 | 1359 | | | |
| | | | | | | 0.932 | C14orf1 | 1290 | | | |
| | | | | | | 0.932 | EFTUD1 | 1307 | | | |
| | | | | | | 0.932 | ZNF507 | 1423 | | | |
| | | | | | | 0.932 | TRIP11 | 1410 | | | |
| | | | | | | 0.931 | ASCC3 | 1283 | | | |
| | | | | | | 0.931 | ERCC4 | 1311 | | | |
| | | | | | | 0.930 | CD84 | 1293 | | | |
| | | | | | | 0.930 | RAD50 | 1376 | | | |
| | | | | | | 0.927 | CLUAP1 | 1300 | | | |
| | | | | | | 0.927 | FASTKD2 | 1315 | | | |
| | | | | | | 0.923 | TCF7L2 | 1401 | | | |
| | | | | | | 0.922 | CKAP2 | 1297 | | | |
| | | | | | | 0.921 | ESF1 | 1312 | | | |
| | | | | | | 0.921 | VPS13B | 1416 | | | |
| | | | | | | 0.919 | RMND1 | 1384 | | | |
| | | | | | | 0.916 | PHC3 | 1365 | | | |
| | | | | | | 0.916 | ARHGAP5 | 1280 | | | |
| | | | | | | 0.913 | MLLT10 | 1347 | | | |
| | | | | | | 0.913 | CPA3 | 1301 | | | |
| | | | | | | 0.911 | NCBP1 | 1354 | | | |
| | | | | | | 0.911 | MANEA | 1344 | | | |
| | | | | | | 0.908 | RDX | 1379 | | | |
| | | | | | | 0.906 | RIOK2 | 1383 | | | |
| | | | | | | 0.900 | IP07 | 1331 | | | |
| | | | | | | 0.900 | SYT11 | 1398 | | | |
| | | | | | | 0.898 | RNF170 | 1385 | | | |
| | | | | | | 0.896 | SMC6 | 1394 | | | |
| | | | | | | 0.893 | PEX1 | 1364 | | | |
| | | | | | | 0.891 | ATP8A1 | 1284 | | | |
| | | | | | | 0.888 | HIBCH | 1325 | | | |
| | | | | | | 0.887 | GOLPH3L | 1321 | | | |
| | | | | | | 0.882 | ZNF562 | 1424 | | | |
| | | | | | | 0.874 | HRH4 | 1327 | | | |
| | | | | | | 0.864 | KRIT1 | 1338 | | | |
| | | | | | | 0.860 | IKBKAP | 1330 | | | |
| | | | | | | 0.857 | YEATS4 | 1420 | | | |
| | | | | | | 0.854 | CREB1 | 1302 | | | |
| | | | | | | 0.854 | VEZT | 1413 | | | |
| | | | | | | 0.851 | PSMD5 | 1371 | | | |
| | | | | | | 0.849 | LRRC8D | 1342 | | | |
| | | | | | | 0.848 | PRPF39 | 1369 | | | |
| | | | | | | 0.839 | NR2C1 | 1362 | | | |
| | | | | | | 0.838 | CD40LG | 1292 | | | |
| | | | | | | 0.835 | ENOSF1 | 1309 | | | |
| | | | | | | 0.831 | TLK1 | 1406 | | | |
| | | | | | | 0.825 | RFC1 | 1381 | | | |
| | | | | | | 0.823 | NIP7 | 1358 | | | |
| | | | | | | 0.822 | MTRR | 1350 | | | |
| | | | | | | 0.819 | MTO1 | 1349 | | | |
| | | | | | | 0.819 | METTL5 | 1346 | | | |
| | | | | | | 0.814 | RNMT | 1386 | | | |
| | | | | | | 0.813 | MRPS10 | 1348 | | | |
| | | | | | | 0.812 | WDR70 | 1418 | | | |
| | | | | | | 0.809 | IQCB1 | 1332 | | | |
| | | | | | | 0.809 | REPS1 | 1380 | | | |
| | | | | | | 0.806 | PRUNE | 1370 | | | |
| | | | | | | 0.806 | NFX1 | 1356 | | | |
| | | | | | | 0.801 | AGA | 1277 | | | |
| | | | | | | 0.796 | EIF5B | 1308 | | | |
| | | | | | | 0.791 | NOL8 | 1360 | | | |
| | | | | | | 0.789 | SMC3 | 1393 | | | |
| | | | | | | 0.786 | S100PBP | 1388 | | | |
| | | | | | | 0.779 | BZW2 | 1289 | | | |
| | | | | | | 0.761 | CYSLTR1 | 1304 | | | |
| | | | | | | 0.748 | LARP1 | 1340 | | | |
| | | | | | | 0.734 | GGPS1 | 1320 | | | |
| | | | | | | 0.599 | PTGS1 | 1372 | | | |

TABLE 29
TOP PERFORMING (BASED ON AUC) BASIRS DERIVED
BIOMARKERS FOLLOWING A GREEDY SEARCH ON A
COMBINED DATASET
The top derived biomarker was TSPO:HCLS1 with an AUC of 0.838.
Incremental AUC increases can be made with the addition of further
derived biomarkers as indicated.

| Greedy Addition | AUC | AUC_{SD} |
|---|---|---|
| TSPO_HCLS1 | 0.838 | 0.0083 |
| OPLAH_ZHX2 | 0.863 | 0.0061 |
| TSPO_RNASE6 | 0.881 | 0.0055 |
| GAS7_CAMK1D | 0.891 | 0.0044 |
| ST3GAL2_PRKD2 | 0.897 | 0.0032 |
| PCOLCE2_NMUR1 | 0.901 | 0.0031 |
| CR1_HAL | 0.901 | 0.0040 |

TABLE 30
BASIRS NUMERATORS AND DENOMINATORS APPEARING MORE
THAN ONCE IN DERIVED BIOMARKERS WITH A MEAN AUC >
0.85 IN THE VALIDATION DATASETS
BaSIRS numerators and denominators appearing more than once in
derived biomarkers with an AUC > 0.85

| Numerator | # | Denominator | # |
|---|---|---|---|
| PDGFC | 28 | INPP5D | 6 |
| TSPO | 11 | KLRD1 | 6 |
| GAS7 | 9 | KLRF1 | 6 |
| PCOLCE2 | 8 | NLRP1 | 5 |
| GALNT2 | 6 | GAB2 | 4 |
| ALPL | 5 | CAMK1D | 3 |
| ITGA7 | 4 | CCNK | 3 |
| CD82 | 3 | ADAM19 | 2 |
| CR1 | 3 | HAL | 2 |
| HK3 | 3 | MME | 2 |
| OPLAH | 3 | NOV | 2 |
| COX15 | 2 | PARP8 | 2 |
| ENTPD7 | 2 | RNASE6 | 2 |
| SMPDL3A | 2 | YPEL1 | 2 |
| TMEM165 | 2 | ZFP36L2 | 2 |

TABLE 31
TOP PERFORMING (BASED ON AUC) VASIRS DERIVED
BIOMARKERS FOLLOWING A GREEDY SEARCH ON A
COMBINED DATASET
The top derived biomarker was ISG15:IL16 with an AUC of 0.92.
Incremental AUC increases can be made with the addition of further
derived biomarkers as indicated.

| Greedy Addition | Individual AUC | Combined AUC |
|---|---|---|
| ISG15:IL16 | 0.92 | 0.92 |
| OASL:ADGRE5 | 0.865 | 0.936 |
| TAP1:TGFBR2 | 0.879 | 0.945 |
| IFIH1:CRLF3 | 0.873 | 0.946 |
| IFI44:IL4R | 0.867 | 0.947 |
| EIF2AK2:SYPL1 | 0.859 | 0.947 |
| OAS2:LEF1 | 0.875 | 0.946 |
| STAT1:PCBP2 | 0.844 | 0.944 |
| IFI6:IL6ST | 0.821 | 0.942 |

TABLE 32
VASIRS NUMERATORS AND DENOMINATORS APPEARING
MORE THAN TWICE IN THE 473 DERIVED BIOMARKERS WITH A
MEAN AUC > 0.80 IN AT LEAST 11 OF 14 VIRAL DATASETS.
VaSIRS numerators and denominators appearing more than once in
derived biomarkers with an AUC > 0.80

| Numerator | # | Denominator | # |
|---|---|---|---|
| OASL | 344 | ABLIM1 | 12 |
| USP18 | 50 | IL16 | 9 |
| EIF2AK2 | 13 | SYPL1 | 6 |
| ISG15 | 8 | CYLD | 5 |
| IFI44 | 7 | IL4R | 5 |
| LAP3 | 7 | LTB | 5 |
| ZBP1 | 6 | MYC | 5 |
| IFI6 | 5 | PCF11 | 5 |
| OAS2 | 4 | TGFBR2 | 5 |
| DDX60 | 3 | CAMK1D | 4 |
| DHX58 | 3 | IL6ST | 4 |
| IFIH1 | 3 | LEF1 | 4 |
| TAP1 | 3 | ZNF274 | 4 |
| | | BTG1 | 3 |
| | | CRLF3 | 3 |
| | | DGKA | 3 |
| | | SESN1 | 3 |
| | | TNRC6B | 3 |
| | | ZFC3H1 | 3 |

TABLE 33
TOP PERFORMING (BASED ON AUC) PASIRS DERIVED
BIOMARKERS FOLLOWING A GREEDY SEARCH ON A
COMBINED DATASET
The top derived biomarker was TTC17:G6PD with an AUC of 0.96.
Incremental AUC increases can be made with the addition of further
derived biomarkers as indicated.

| Greedy Addition | Individual AUC | Combined AUC |
|---|---|---|
| TTC17_G6PD | 0.96 | 0.96 |
| HERC6_LAP3 | 0.84 | 0.99 |
| NUP160_TPP1 | 0.847 | 0.99 |

TABLE 34
PASIRS NUMERATORS AND DENOMINATORS APPEARING MORE
THAN TWICE IN THE 523 DERIVED BIOMARKERS WITH A MEAN
AUC > 0.75 IN THE VALIDATION DATASETS.
PaSIRS numerators and denominators appearing more than once in
derived biomarkers with an AUC > 0.75

| Numerator | # | Denominator | # |
|---|---|---|---|
| ARID1A | 62 | SQRDL | 45 |
| CEP192 | 35 | CEBPB | 40 |
| EXOSC10 | 33 | WARS | 39 |
| IMP3 | 33 | CD63 | 38 |
| RPL9 | 24 | SH3GLB1 | 31 |
| TTC17 | 24 | POMP | 23 |
| BCL11A | 22 | PGD | 21 |
| TCF4 | 21 | FCER1G | 17 |
| ASXL2 | 18 | MYD88 | 15 |
| RPS4X | 15 | UPP1 | 15 |
| ZMYND11 | 13 | G6PD | 13 |
| AHCTF1 | 12 | GNG5 | 13 |
| LY9 | 12 | LAP3 | 12 |
| FBXO11 | 11 | TCIRG1 | 12 |
| FNTA | 11 | SERPINB1 | 11 |
| ARIH2 | 10 | ATOX1 | 10 |
| EXOSC2 | 9 | TANK | 10 |
| NUP160 | 8 | TSPO | 10 |
| ZBED5 | 8 | TNIP1 | 9 |
| CAMK2G | 7 | CSTB | 8 |
| CNOT7 | 7 | ENO1 | 8 |
| TOP2B | 7 | RALB | 8 |
| ARHGAP17 | 6 | VAMP3 | 7 |
| HLA-DPA1 | 6 | BCL6 | 6 |
| IRF8 | 6 | LDHA | 6 |
| PCID2 | 6 | FGR | 5 |
| RPL15 | 6 | IRF1 | 5 |
| RPL22 | 6 | ERLIN1 | 4 |
| ADSL | 5 | PCMT1 | 4 |
| IL10RA | 5 | PRKCD | 4 |
| NOSIP | 5 | RTN4 | 4 |
| SETX | 5 | SPI1 | 4 |
| SUCLG2 | 5 | TAP1 | 4 |
| CSNK1G2 | 4 | UBE2L6 | 4 |
| PREPL | 4 | C3AR1 | 3 |
| RPS14 | 4 | FLII | 3 |
| TMEM50B | 4 | NFIL3 | 3 |
| TROVE2 | 4 | PLAUR | 3 |
| CHN2 | 3 | SLAMF7 | 3 |
| METAP1 | 3 | WAS | 3 |
| MLLT10 | 3 | ATP2A2 | 2 |
| SERBP1 | 3 | ETV6 | 2 |
| SERTAD2 | 3 | GPI | 2 |
| CCR7 | 2 | HCK | 2 |
| CLIP4 | 2 | PCBP1 | 2 |
| SEH1L | 2 | PLSCR1 | 2 |
| TRAF3IP3 | 2 | RAB27A | 2 |
| UFM1 | 2 | STAT3 | 2 |
| USP34 | 2 | TIMP2 | 2 |
| ZNF266 | 2 | TPP1 | 2 |
| | | TUBA1B | 2 |

TABLE 35
TABLE OF INDIVIDUAL PERFORMANCE, IN DESCENDING AUC, OF THE 523 PASIRS DERIVED
BIOMARKERS WITH AN AVERAGE AUC >0.75 ACROSS EACH OF FIVE PROTOZOAL DATASETS.

| | | | Severe vs | | | |
|---|---|---|---|---|---|---|
| | | | Mild | | | |
| | Malaria | Leishmania | Malaria | Malaria | Malaria | |
| Derived Biomarker | GSE34404 | G5E64610 | G5E33811 | G5E15221 | G5E5418 | Mean |
| RPL9_WARS | 0.935 | 0.920 | 1.000 | 0.852 | 0.964 | 0.934 |
| RPL9_CSTB | 0.895 | 0.900 | 1.000 | 0.888 | 0.982 | 0.933 |
| NUP160_WARS | 0.915 | 0.980 | 0.920 | 0.898 | 0.948 | 0.932 |
| IMP3_ATOX1 | 0.950 | 0.900 | 0.880 | 0.974 | 0.955 | 0.932 |
| RPS4X_WARS | 0.937 | 1.000 | 0.840 | 0.944 | 0.933 | 0.931 |
| TCF4_CEBPB | 0.984 | 0.960 | 0.840 | 0.959 | 0.909 | 0.930 |
| IMP3_LAP3 | 0.937 | 0.900 | 0.920 | 0.929 | 0.952 | 0.927 |
| EXOSC10_WARS | 0.960 | 1.000 | 0.840 | 0.939 | 0.891 | 0.926 |
| TTC17_WARS | 0.954 | 1.000 | 0.800 | 0.990 | 0.885 | 0.926 |
| TCF4_WARS | 0.955 | 0.960 | 0.960 | 0.903 | 0.848 | 0.925 |
| METAP1_WARS | 0.912 | 0.940 | 0.880 | 0.913 | 0.979 | 0.925 |
| FNTA_POMP | 0.966 | 0.920 | 0.840 | 0.923 | 0.970 | 0.924 |
| TCF4_TANK | 0.975 | 0.980 | 0.960 | 0.781 | 0.921 | 0.923 |
| TOP2B_CEBPB | 0.936 | 1.000 | 0.760 | 0.934 | 0.979 | 0.922 |
| AHCTF1_CEBPB | 0.977 | 0.820 | 0.840 | 0.980 | 0.991 | 0.921 |
| RPS4X_MYD88 | 0.935 | 0.980 | 0.800 | 0.929 | 0.964 | 0.921 |
| IMP3_CEBPB | 0.976 | 0.880 | 0.840 | 0.923 | 0.985 | 0.921 |
| RPL9_CEBPB | 0.952 | 1.000 | 0.800 | 0.852 | 1.000 | 0.921 |
| RPS4X_CEBPB | 0.949 | 1.000 | 0.720 | 0.949 | 0.985 | 0.921 |
| TTC17_CEBPB | 0.980 | 1.000 | 0.640 | 0.990 | 0.991 | 0.920 |
| PREPL_WARS | 0.911 | 1.000 | 0.920 | 0.791 | 0.979 | 0.920 |
| TCF4_LAP3 | 0.944 | 0.980 | 0.880 | 0.918 | 0.876 | 0.920 |
| ZBED5_WARS | 0.940 | 0.940 | 0.880 | 0.974 | 0.864 | 0.920 |
| TCF4_POMP | 0.952 | 0.900 | 0.880 | 0.954 | 0.909 | 0.919 |
| NUP160_SQRDL | 0.899 | 0.960 | 0.800 | 0.959 | 0.973 | 0.918 |
| TRIT1_WARS | 0.908 | 1.000 | 0.800 | 0.903 | 0.976 | 0.917 |
| ZBED5_CEBPB | 0.965 | 0.940 | 0.720 | 0.990 | 0.964 | 0.916 |
| IMP3_WARS | 0.964 | 0.880 | 0.920 | 0.908 | 0.906 | 0.916 |
| RPS4X_SQRDL | 0.934 | 1.000 | 0.720 | 0.980 | 0.942 | 0.915 |
| NUP160_POMP | 0.923 | 0.880 | 0.840 | 0.954 | 0.979 | 0.915 |
| EXOSC10_LAP3 | 0.946 | 1.000 | 0.760 | 0.939 | 0.927 | 0.914 |
| RPS4X_GNG5 | 0.965 | 0.960 | 0.760 | 0.898 | 0.988 | 0.914 |
| TOP2B_WARS | 0.930 | 1.000 | 0.840 | 0.923 | 0.876 | 0.914 |
| RPL9_POMP | 0.959 | 0.840 | 0.880 | 0.918 | 0.970 | 0.913 |
| EXOSC10_ATOX1 | 0.959 | 1.000 | 0.680 | 1.000 | 0.927 | 0.913 |
| TTC17_TANK | 0.958 | 1.000 | 0.720 | 0.923 | 0.964 | 0.913 |
| EXOSC10_CEBPB | 0.977 | 1.000 | 0.680 | 0.929 | 0.979 | 0.913 |
| NOSIP_CEBPB | 0.963 | 0.900 | 0.840 | 0.949 | 0.912 | 0.913 |
| RPL22_CEBPB | 0.950 | 1.000 | 0.720 | 0.959 | 0.933 | 0.913 |
| TTC17_ATP2A2 | 0.941 | 0.940 | 0.760 | 0.939 | 0.982 | 0.912 |
| SEH1L_WARS | 0.955 | 0.980 | 0.840 | 0.837 | 0.945 | 0.911 |
| EXOSC10_UBE2L6 | 0.932 | 1.000 | 0.800 | 0.969 | 0.852 | 0.911 |
| TTC17_LAP3 | 0.919 | 1.000 | 0.680 | 1.000 | 0.948 | 0.910 |
| SUCLG2_CEBPB | 0.976 | 1.000 | 0.800 | 0.959 | 0.812 | 0.909 |
| EXOSC10_G6PD | 0.982 | 1.000 | 0.800 | 0.898 | 0.864 | 0.909 |
| CEP192_WARS | 0.945 | 0.840 | 0.920 | 0.934 | 0.903 | 0.908 |
| NUP160_CD63 | 0.951 | 0.940 | 0.760 | 0.923 | 0.964 | 0.908 |
| TMEM50B_WARS | 0.959 | 0.980 | 0.840 | 0.964 | 0.794 | 0.908 |
| EXOSC10_LDHA | 0.980 | 0.900 | 0.760 | 0.954 | 0.942 | 0.907 |
| ARID1A_CSTB | 0.944 | 0.860 | 0.880 | 0.913 | 0.939 | 0.907 |
| SUCLG2_WARS | 0.963 | 1.000 | 0.920 | 0.969 | 0.682 | 0.907 |
| ARID1A_CEBPB | 0.976 | 0.940 | 0.680 | 0.954 | 0.982 | 0.906 |
| FBXO11_TANK | 0.908 | 0.940 | 0.760 | 0.918 | 1.000 | 0.905 |
| SUCLG2_SH3GLB1 | 0.976 | 1.000 | 0.800 | 0.923 | 0.827 | 0.905 |
| TTC17_G6PD | 0.986 | 0.880 | 0.760 | 1.000 | 0.900 | 0.905 |
| IMP3_PCMT1 | 0.962 | 0.900 | 0.840 | 0.974 | 0.848 | 0.905 |
| ARID1A_LAP3 | 0.909 | 0.980 | 0.760 | 0.939 | 0.936 | 0.905 |
| IMP3_SQRDL | 0.966 | 0.820 | 0.840 | 0.959 | 0.936 | 0.904 |
| TCF4_ATOX1 | 0.948 | 0.980 | 0.760 | 0.923 | 0.909 | 0.904 |
| IMP3_SH3GLB1 | 0.970 | 0.780 | 0.840 | 0.934 | 0.994 | 0.904 |
| EXOSC10_MYD88 | 0.957 | 1.000 | 0.680 | 0.929 | 0.952 | 0.904 |
| LY9_WARS | 0.949 | 0.820 | 0.960 | 0.964 | 0.824 | 0.903 |
| IMP3_CSTB | 0.985 | 0.780 | 0.920 | 0.908 | 0.921 | 0.903 |
| RPL15_CEBPB | 0.968 | 1.000 | 0.800 | 0.985 | 0.761 | 0.903 |
| ARHGAP17_ATOX1 | 0.983 | 0.980 | 0.800 | 0.872 | 0.876 | 0.902 |
| TTC17_MYD88 | 0.968 | 0.960 | 0.680 | 0.944 | 0.958 | 0.902 |
| EXOSC10_TCIRG1 | 0.977 | 1.000 | 0.680 | 0.934 | 0.918 | 0.902 |
| ZMYND11_CEBPB | 0.938 | 1.000 | 0.600 | 0.980 | 0.991 | 0.902 |
| CEP192_TANK | 0.959 | 0.860 | 0.840 | 0.872 | 0.976 | 0.901 |
| IMP3_UBE2L6 | 0.918 | 0.900 | 0.840 | 0.954 | 0.894 | 0.901 |
| RPS4X_CD63 | 0.973 | 1.000 | 0.640 | 0.974 | 0.918 | 0.901 |
| RPL9_CD63 | 0.984 | 0.920 | 0.720 | 0.908 | 0.973 | 0.901 |
| ARID1A_UBE2L6 | 0.887 | 0.960 | 0.760 | 0.959 | 0.933 | 0.900 |
| TCF4_UBE2L6 | 0.923 | 0.960 | 0.920 | 0.888 | 0.806 | 0.899 |
| ARID1A_WARS | 0.938 | 0.920 | 0.800 | 0.918 | 0.918 | 0.899 |
| CAMK2G_G6PD | 0.925 | 0.980 | 0.720 | 0.944 | 0.924 | 0.899 |
| RPS4X_SH3GLB1 | 0.941 | 0.940 | 0.680 | 0.954 | 0.979 | 0.899 |
| RPL9_TANK | 0.929 | 0.960 | 0.880 | 0.730 | 0.994 | 0.898 |
| IMP3_TANK | 0.942 | 0.840 | 0.880 | 0.842 | 0.988 | 0.898 |
| ZBED5_SH3GLB1 | 0.959 | 0.880 | 0.720 | 0.990 | 0.942 | 0.898 |
| TMEM50B_CEBPB | 0.963 | 1.000 | 0.680 | 0.964 | 0.882 | 0.898 |
| RPS4X_POMP | 0.953 | 0.940 | 0.680 | 0.969 | 0.945 | 0.898 |
| TOP2B_POMP | 0.948 | 0.980 | 0.640 | 0.949 | 0.970 | 0.897 |
| METAP1_POMP | 0.921 | 0.880 | 0.760 | 0.934 | 0.991 | 0.897 |
| EXOSC10_CSTB | 0.964 | 0.940 | 0.760 | 0.918 | 0.903 | 0.897 |
| ZNF266_CEBPB | 0.948 | 0.920 | 0.720 | 0.985 | 0.912 | 0.897 |
| TTC17_ATOX1 | 0.914 | 1.000 | 0.600 | 0.995 | 0.976 | 0.897 |
| CSNK1G2_G6PD | 0.978 | 1.000 | 0.680 | 0.923 | 0.900 | 0.896 |
| SETX_CEBPB | 0.983 | 0.960 | 0.680 | 0.893 | 0.964 | 0.896 |
| ARHGAP17_CEBPB | 0.986 | 1.000 | 0.800 | 0.791 | 0.900 | 0.895 |
| ZMYND11_WARS | 0.919 | 1.000 | 0.680 | 0.974 | 0.903 | 0.895 |
| IMP3_UPP1 | 0.982 | 0.880 | 0.800 | 0.934 | 0.879 | 0.895 |
| EXOSC10_IRF1 | 0.961 | 1.000 | 0.760 | 0.821 | 0.930 | 0.895 |
| UFM1_CEBPB | 0.948 | 0.920 | 0.640 | 1.000 | 0.964 | 0.894 |
| ARID1A_LDHA | 0.956 | 0.800 | 0.800 | 0.954 | 0.961 | 0.894 |
| RPL9_ATOX1 | 0.906 | 0.960 | 0.680 | 0.934 | 0.991 | 0.894 |
| TTC17_GNG5 | 0.972 | 0.840 | 0.680 | 0.990 | 0.988 | 0.894 |
| EXOSC10_POMP | 0.979 | 0.980 | 0.600 | 0.959 | 0.948 | 0.893 |
| ARID1A_ATOX1 | 0.904 | 0.980 | 0.600 | 0.995 | 0.988 | 0.893 |
| RPL9_SH3GLB1 | 0.951 | 0.900 | 0.680 | 0.934 | 1.000 | 0.893 |
| LY9_CEBPB | 0.971 | 0.760 | 0.800 | 0.969 | 0.964 | 0.893 |
| RP514_WARS | 0.942 | 0.980 | 0.840 | 0.883 | 0.818 | 0.893 |
| FNTA_SQRDL | 0.960 | 0.900 | 0.720 | 0.964 | 0.918 | 0.893 |
| APEX1_CD63 | 0.965 | 1.000 | 0.720 | 0.964 | 0.812 | 0.892 |
| SETX_WARS | 0.950 | 0.940 | 0.760 | 0.939 | 0.870 | 0.892 |
| IMP3_TNIP1 | 0.971 | 0.860 | 0.840 | 0.872 | 0.915 | 0.892 |
| FNTA_CD63 | 0.995 | 0.900 | 0.760 | 0.923 | 0.879 | 0.891 |
| TTC17_TCIRG1 | 0.988 | 0.920 | 0.680 | 0.995 | 0.873 | 0.891 |
| EXOSC10_SH3GLB1 | 0.981 | 0.960 | 0.600 | 0.913 | 1.000 | 0.891 |
| RPS4X_FCER1G | 0.979 | 0.880 | 0.640 | 0.969 | 0.985 | 0.891 |
| RPS4X_PGD | 0.970 | 1.000 | 0.680 | 0.980 | 0.824 | 0.891 |
| CAMK2G_CEBPB | 0.926 | 1.000 | 0.600 | 0.944 | 0.982 | 0.890 |
| ZMYND11_G6PD | 0.968 | 0.880 | 0.640 | 1.000 | 0.964 | 0.890 |
| FNTA_CEBPB | 0.977 | 1.000 | 0.600 | 0.898 | 0.976 | 0.890 |
| ZMYND11_CD63 | 0.968 | 0.980 | 0.560 | 1.000 | 0.942 | 0.890 |
| TCF4_RALB | 0.980 | 0.980 | 0.800 | 0.929 | 0.761 | 0.890 |
| ARHGAP17_LAP3 | 0.959 | 0.980 | 0.880 | 0.776 | 0.855 | 0.890 |
| IMP3_CD63 | 0.994 | 0.720 | 0.840 | 0.964 | 0.930 | 0.890 |
| ZMYND11_C3AR1 | 0.978 | 0.840 | 0.720 | 0.964 | 0.945 | 0.890 |
| AHCTF1_WARS | 0.943 | 0.800 | 0.840 | 0.929 | 0.936 | 0.890 |
| RPS4X_ENO1 | 0.937 | 0.920 | 0.720 | 0.995 | 0.873 | 0.889 |
| CEP192_PLSCR1 | 0.950 | 0.960 | 0.760 | 0.913 | 0.861 | 0.889 |
| EXOSC9_POMP | 0.977 | 0.940 | 0.760 | 0.969 | 0.797 | 0.889 |
| FNTA_GNG5 | 0.968 | 0.960 | 0.640 | 0.898 | 0.976 | 0.888 |
| CEP192_IRF1 | 0.945 | 0.980 | 0.800 | 0.765 | 0.952 | 0.888 |
| CEP192_CEBPB | 0.989 | 0.860 | 0.680 | 0.923 | 0.988 | 0.888 |
| ZMYND11_CSTB | 0.907 | 0.960 | 0.640 | 0.980 | 0.952 | 0.888 |
| FNTA_SH3GLB1 | 0.966 | 0.880 | 0.720 | 0.893 | 0.979 | 0.888 |
| ARID1A_TAP1 | 0.937 | 0.980 | 0.640 | 0.944 | 0.936 | 0.887 |
| NOSIP_WARS | 0.944 | 0.860 | 0.880 | 0.944 | 0.809 | 0.887 |
| RPS4X_UPP1 | 0.945 | 1.000 | 0.600 | 0.949 | 0.942 | 0.887 |
| CNOT7_CEBPB | 0.984 | 1.000 | 0.720 | 0.852 | 0.879 | 0.887 |
| ARHGAP17_WARS | 0.978 | 1.000 | 0.880 | 0.801 | 0.776 | 0.887 |
| UFM1_WARS | 0.923 | 0.880 | 0.760 | 0.980 | 0.891 | 0.887 |
| PREPL_SQRDL | 0.905 | 0.980 | 0.680 | 0.867 | 1.000 | 0.886 |
| IMP3_TAP1 | 0.953 | 0.920 | 0.800 | 0.944 | 0.815 | 0.886 |
| ARID1A_PCMT1 | 0.960 | 0.980 | 0.680 | 0.985 | 0.827 | 0.886 |
| SUCLG2_SQRDL | 0.977 | 1.000 | 0.760 | 0.959 | 0.733 | 0.886 |
| RPL22_SH3GLB1 | 0.941 | 0.940 | 0.680 | 0.959 | 0.909 | 0.886 |
| BCL11A_WARS | 0.960 | 0.660 | 0.960 | 0.980 | 0.870 | 0.886 |
| CNOT7_WARS | 0.969 | 1.000 | 0.840 | 0.832 | 0.788 | 0.886 |
| ZBED5_TCIRG1 | 0.964 | 0.820 | 0.760 | 0.985 | 0.900 | 0.886 |
| EXOSC10_SQRDL | 0.974 | 1.000 | 0.560 | 0.985 | 0.909 | 0.886 |
| AHCTF1_GNG5 | 0.970 | 0.640 | 0.880 | 0.964 | 0.973 | 0.885 |
| ZMYND11_FCER1G | 0.959 | 0.940 | 0.600 | 0.980 | 0.948 | 0.885 |
| TOP2B_ENO1 | 0.966 | 0.980 | 0.680 | 0.964 | 0.836 | 0.885 |
| IMP3_IRF1 | 0.956 | 0.940 | 0.840 | 0.750 | 0.939 | 0.885 |
| CEP192_TAP1 | 0.950 | 0.920 | 0.760 | 0.929 | 0.867 | 0.885 |
| RPL9_MYD88 | 0.943 | 0.820 | 0.840 | 0.847 | 0.973 | 0.885 |
| RPL22_GNG5 | 0.956 | 0.860 | 0.760 | 0.929 | 0.918 | 0.885 |
| FNTA_MYD88 | 0.968 | 0.940 | 0.640 | 0.903 | 0.970 | 0.884 |
| TCF4_GNG5 | 0.975 | 0.800 | 0.800 | 0.918 | 0.927 | 0.884 |
| EXOSC10_TANK | 0.959 | 0.920 | 0.720 | 0.862 | 0.955 | 0.883 |
| MLLT10_WARS | 0.908 | 0.840 | 0.760 | 0.944 | 0.964 | 0.883 |
| TTC17_POMP | 0.932 | 0.920 | 0.640 | 0.969 | 0.955 | 0.883 |
| TCF4_MYD88 | 0.972 | 0.860 | 0.800 | 0.888 | 0.894 | 0.883 |
| IMP3_MYD88 | 0.958 | 0.820 | 0.800 | 0.908 | 0.927 | 0.883 |
| TOP2B_CD63 | 0.980 | 1.000 | 0.600 | 0.929 | 0.903 | 0.882 |
| CEP192_RALB | 0.982 | 0.840 | 0.760 | 0.959 | 0.870 | 0.882 |
| NUP160_PGD | 0.950 | 0.960 | 0.720 | 0.944 | 0.833 | 0.882 |
| RPL9_SQRDL | 0.938 | 0.840 | 0.720 | 0.918 | 0.991 | 0.881 |
| CEP192_PCMT1 | 0.965 | 0.920 | 0.840 | 0.893 | 0.788 | 0.881 |
| TCF4_SQRDL | 0.976 | 0.900 | 0.720 | 0.939 | 0.870 | 0.881 |
| RPL9_GNG5 | 0.962 | 0.760 | 0.800 | 0.878 | 1.000 | 0.880 |
| EXOSC10_CD63 | 0.997 | 1.000 | 0.560 | 0.954 | 0.888 | 0.880 |
| TCF4_SH3GLB1 | 0.979 | 0.820 | 0.760 | 0.913 | 0.927 | 0.880 |
| ADSL_WARS | 0.955 | 0.980 | 0.840 | 0.760 | 0.864 | 0.880 |
| TTC17_SH3GLB1 | 0.972 | 0.920 | 0.560 | 0.969 | 0.976 | 0.879 |
| ARID1A_SQRDL | 0.953 | 0.940 | 0.560 | 0.974 | 0.970 | 0.879 |
| ARID1A_G6PD | 0.972 | 0.780 | 0.760 | 0.893 | 0.988 | 0.879 |
| AHCTF1_TANK | 0.947 | 0.700 | 0.840 | 0.923 | 0.982 | 0.878 |
| EXOSC2_CEBPB | 0.950 | 1.000 | 0.600 | 0.923 | 0.918 | 0.878 |
| RPS4X_SERPINB1 | 0.953 | 0.980 | 0.640 | 0.939 | 0.879 | 0.878 |
| FBXO11_RALB | 0.946 | 0.840 | 0.720 | 0.939 | 0.945 | 0.878 |
| TMEM50B_SQRDL | 0.968 | 0.900 | 0.680 | 0.990 | 0.852 | 0.878 |
| CSNK1G2_CEBPB | 0.959 | 1.000 | 0.560 | 0.878 | 0.988 | 0.877 |
| RPL15_SH3GLB1 | 0.964 | 0.980 | 0.720 | 0.990 | 0.730 | 0.877 |
| BCL11A_G6PD | 0.979 | 0.620 | 0.960 | 0.954 | 0.870 | 0.876 |
| ZBED5_SQRDL | 0.963 | 0.860 | 0.680 | 0.995 | 0.885 | 0.876 |
| ARID1A_SERPINB1 | 0.977 | 0.880 | 0.640 | 0.949 | 0.936 | 0.876 |
| RPS14_SH3GLB1 | 0.954 | 0.940 | 0.640 | 0.908 | 0.939 | 0.876 |
| EXOSC10_TAP1 | 0.969 | 1.000 | 0.600 | 0.949 | 0.864 | 0.876 |
| BCL11A_CEBPB | 0.978 | 0.720 | 0.720 | 1.000 | 0.961 | 0.876 |
| ADSL_ATOX1 | 0.928 | 1.000 | 0.600 | 0.893 | 0.958 | 0.876 |
| TCF4_FCER1G | 0.992 | 0.780 | 0.760 | 0.923 | 0.921 | 0.875 |
| LY9_SH3GLB1 | 0.961 | 0.720 | 0.760 | 0.964 | 0.970 | 0.875 |
| IMP3_GNG5 | 0.979 | 0.700 | 0.800 | 0.918 | 0.976 | 0.875 |
| SERTAD2_CEBPB | 0.979 | 0.820 | 0.760 | 0.908 | 0.906 | 0.875 |
| AHCTF1_MYD88 | 0.962 | 0.640 | 0.840 | 0.964 | 0.967 | 0.875 |
| ARID1A_ENO1 | 0.949 | 0.800 | 0.640 | 0.995 | 0.988 | 0.874 |
| EXOSC10_UPP1 | 0.990 | 1.000 | 0.560 | 0.923 | 0.897 | 0.874 |
| CEP192_CSTB | 0.939 | 0.760 | 0.880 | 0.872 | 0.918 | 0.874 |
| LY9_SQRDL | 0.967 | 0.720 | 0.800 | 1.000 | 0.882 | 0.874 |
| LY9_TNIP1 | 0.982 | 0.660 | 0.920 | 0.903 | 0.903 | 0.874 |
| CNOT7_G6PD | 0.966 | 0.980 | 0.760 | 0.857 | 0.803 | 0.873 |
| ARID1A_PLSCR1 | 0.946 | 0.960 | 0.640 | 0.949 | 0.870 | 0.873 |
| CEP192_ATOX1 | 0.920 | 0.920 | 0.600 | 0.974 | 0.948 | 0.873 |
| IMP3_ENO1 | 0.983 | 0.720 | 0.800 | 0.985 | 0.876 | 0.873 |
| ARID1A_IRF1 | 0.923 | 1.000 | 0.640 | 0.811 | 0.988 | 0.872 |
| EXOSC10_GNG5 | 0.978 | 0.840 | 0.680 | 0.903 | 0.961 | 0.872 |
| LY9_ATOX1 | 0.953 | 0.700 | 0.760 | 1.000 | 0.948 | 0.872 |
| FBXO11_CEBPB | 0.932 | 0.880 | 0.600 | 0.944 | 1.000 | 0.871 |
| RPL9_SLAMF7 | 0.926 | 0.920 | 0.760 | 0.903 | 0.845 | 0.871 |
| RPL9_TNIP1 | 0.946 | 0.880 | 0.800 | 0.755 | 0.973 | 0.871 |
| PREPL_CD63 | 0.946 | 1.000 | 0.560 | 0.847 | 1.000 | 0.871 |
| ARHGAP17_SQRDL | 0.984 | 0.960 | 0.720 | 0.837 | 0.852 | 0.871 |
| ZBED5_POMP | 0.953 | 0.780 | 0.680 | 1.000 | 0.939 | 0.871 |
| RPS4X_TSPO | 0.944 | 0.820 | 0.720 | 0.944 | 0.924 | 0.870 |
| IMP3_G6PD | 0.989 | 0.680 | 0.840 | 0.939 | 0.903 | 0.870 |
| CEP192_POMP | 0.932 | 0.780 | 0.720 | 0.964 | 0.955 | 0.870 |
| TMEM5OB_CD63 | 0.988 | 0.860 | 0.680 | 0.995 | 0.827 | 0.870 |
| ZMYND11_ENO1 | 0.931 | 0.880 | 0.600 | 1.000 | 0.936 | 0.870 |
| CEP192_LAP3 | 0.920 | 0.860 | 0.680 | 0.923 | 0.964 | 0.869 |
| RPL9_UPP1 | 0.948 | 0.960 | 0.640 | 0.842 | 0.958 | 0.869 |
| TCF4_SERPINB1 | 0.984 | 0.920 | 0.760 | 0.883 | 0.800 | 0.869 |
| AHCTF1_PLAUR | 0.973 | 0.720 | 0.800 | 0.857 | 0.994 | 0.869 |
| RPL22_WARS | 0.932 | 1.000 | 0.760 | 0.903 | 0.748 | 0.869 |
| EXOSC2_POMP | 0.924 | 0.900 | 0.640 | 0.934 | 0.945 | 0.869 |
| ZMYND11_SH3GLB1 | 0.919 | 0.920 | 0.520 | 0.990 | 0.994 | 0.869 |
| RPS14_CD63 | 0.983 | 0.960 | 0.600 | 0.949 | 0.848 | 0.868 |
| CAMK2G_SQRDL | 0.882 | 1.000 | 0.520 | 0.990 | 0.948 | 0.868 |
| ARIH2_CEBPB | 0.959 | 0.780 | 0.680 | 0.980 | 0.939 | 0.868 |
| ARID1A_NFIL3 | 0.975 | 0.980 | 0.600 | 0.791 | 0.988 | 0.867 |
| IMP3_POMP | 0.968 | 0.760 | 0.720 | 0.944 | 0.942 | 0.867 |
| EXOSC10_ENO1 | 0.979 | 1.000 | 0.560 | 0.995 | 0.800 | 0.867 |
| PREPL_SH3GLB1 | 0.922 | 0.960 | 0.600 | 0.852 | 1.000 | 0.867 |
| TTC17_BCL6 | 0.991 | 0.920 | 0.600 | 0.903 | 0.918 | 0.867 |
| ZMYND11_POMP | 0.911 | 0.980 | 0.480 | 1.000 | 0.958 | 0.866 |
| IMP3_RIT1 | 0.967 | 0.880 | 0.760 | 0.939 | 0.782 | 0.866 |
| CAMK2G_CD63 | 0.961 | 1.000 | 0.480 | 0.980 | 0.906 | 0.865 |
| IL10RA_CEBPB | 0.976 | 0.800 | 0.680 | 0.985 | 0.885 | 0.865 |
| FNTA_TCIRG1 | 0.951 | 0.860 | 0.640 | 0.913 | 0.961 | 0.865 |
| CAMK2G_TCIRG1 | 0.912 | 0.980 | 0.560 | 0.959 | 0.912 | 0.865 |
| EXOSC10_PCMT1 | 0.982 | 0.980 | 0.760 | 0.918 | 0.682 | 0.865 |
| RPS14_SQRDL | 0.956 | 0.940 | 0.600 | 0.929 | 0.897 | 0.864 |
| IMP3_PGD | 0.994 | 0.720 | 0.840 | 0.949 | 0.818 | 0.864 |
| ZBED5_TNIP1 | 0.987 | 0.860 | 0.720 | 0.898 | 0.855 | 0.864 |
| CHN2_WARS | 0.950 | 1.000 | 0.640 | 0.786 | 0.942 | 0.864 |
| IMP3_TCIRG1 | 0.970 | 0.800 | 0.800 | 0.908 | 0.839 | 0.863 |
| AHCTF1_SQRDL | 0.957 | 0.660 | 0.760 | 0.985 | 0.955 | 0.863 |
| CLIP4_WARS | 0.927 | 0.740 | 0.760 | 0.944 | 0.942 | 0.863 |
| NOSIP_POMP | 0.950 | 0.800 | 0.680 | 0.980 | 0.903 | 0.862 |
| RPL22_SQRDL | 0.933 | 0.920 | 0.640 | 0.985 | 0.833 | 0.862 |
| IMP3_VAMP3 | 0.966 | 0.620 | 0.840 | 0.934 | 0.952 | 0.862 |
| TTC17_TIMP2 | 0.971 | 0.780 | 0.640 | 0.990 | 0.930 | 0.862 |
| TTC17_SQRDL | 0.956 | 0.980 | 0.440 | 0.995 | 0.939 | 0.862 |
| ARID1A_CD63 | 0.985 | 0.860 | 0.520 | 0.985 | 0.961 | 0.862 |
| FNTA_LAP3 | 0.923 | 0.960 | 0.560 | 0.918 | 0.948 | 0.862 |
| BCL11A_LAP3 | 0.931 | 0.680 | 0.800 | 0.974 | 0.924 | 0.862 |
| IMP3_FCER1G | 0.988 | 0.680 | 0.760 | 0.934 | 0.945 | 0.861 |
| CEP192_TNIP1 | 0.964 | 0.860 | 0.680 | 0.878 | 0.924 | 0.861 |
| ZMYND11_SQRDL | 0.910 | 0.920 | 0.520 | 0.995 | 0.961 | 0.861 |
| ZMYND11_GNG5 | 0.935 | 0.960 | 0.440 | 0.985 | 0.985 | 0.861 |
| ARID1A_SLAMF7 | 0.953 | 0.980 | 0.640 | 0.903 | 0.827 | 0.861 |
| ARID1A_TCIRG1 | 0.964 | 0.820 | 0.680 | 0.913 | 0.924 | 0.860 |
| ARID1A_TNIP1 | 0.951 | 1.000 | 0.520 | 0.872 | 0.958 | 0.860 |
| ZMYND11_PGD | 0.971 | 0.940 | 0.560 | 0.990 | 0.839 | 0.860 |
| CSNK1G2_TCIRG1 | 0.969 | 1.000 | 0.520 | 0.908 | 0.900 | 0.859 |
| TTC17_CD63 | 0.986 | 0.980 | 0.440 | 0.969 | 0.921 | 0.859 |
| NUP160_RTN4 | 0.978 | 0.840 | 0.720 | 0.944 | 0.812 | 0.859 |
| RPL15_SQRDL | 0.956 | 1.000 | 0.760 | 0.995 | 0.582 | 0.859 |
| TTC17_UPP1 | 0.981 | 0.940 | 0.520 | 0.939 | 0.912 | 0.858 |
| CAMK2G_FCER1G | 0.941 | 0.940 | 0.520 | 0.954 | 0.936 | 0.858 |
| CEP192_TCIRG1 | 0.966 | 0.740 | 0.760 | 0.913 | 0.912 | 0.858 |
| IRF8_CEBPB | 0.984 | 0.600 | 0.920 | 0.857 | 0.930 | 0.858 |
| CEP192_G6PD | 0.980 | 0.660 | 0.880 | 0.898 | 0.873 | 0.858 |
| FBXO11_UPP1 | 0.942 | 0.840 | 0.600 | 0.929 | 0.979 | 0.858 |
| ARIH2_TCIRG1 | 0.971 | 0.700 | 0.720 | 0.964 | 0.933 | 0.858 |
| PCID2_WARS | 0.948 | 0.640 | 0.800 | 0.923 | 0.976 | 0.858 |
| CAMK2G_PGD | 0.962 | 0.980 | 0.560 | 0.985 | 0.800 | 0.857 |
| EXOSC10_FLII | 0.954 | 0.840 | 0.680 | 0.934 | 0.879 | 0.857 |
| RPL15_CD63 | 0.991 | 1.000 | 0.720 | 0.990 | 0.585 | 0.857 |
| RPL22_CD63 | 0.978 | 0.960 | 0.600 | 0.959 | 0.788 | 0.857 |
| CNOT7_SQRDL | 0.956 | 1.000 | 0.600 | 0.862 | 0.867 | 0.857 |
| FBXO11_SQRDL | 0.914 | 0.860 | 0.520 | 0.990 | 1.000 | 0.857 |
| TCF4_UPP1 | 0.988 | 0.900 | 0.760 | 0.827 | 0.809 | 0.857 |
| PCID2_CEBPB | 0.953 | 0.660 | 0.720 | 0.949 | 1.000 | 0.856 |
| CNOT7_CSTB | 0.953 | 0.940 | 0.760 | 0.816 | 0.812 | 0.856 |
| ARID1A_PGD | 0.991 | 0.880 | 0.560 | 0.964 | 0.885 | 0.856 |
| ARID1A_STAT3 | 0.956 | 0.960 | 0.560 | 0.913 | 0.891 | 0.856 |
| NOSIP_TCIRG1 | 0.954 | 0.720 | 0.800 | 0.944 | 0.861 | 0.856 |
| RPL9_FCER1G | 0.979 | 0.740 | 0.680 | 0.888 | 0.991 | 0.856 |
| ARID1A_TRPC4AP | 0.946 | 0.920 | 0.600 | 0.811 | 1.000 | 0.855 |
| ARID1A_SH3GLB1 | 0.964 | 0.820 | 0.560 | 0.944 | 0.988 | 0.855 |
| CEP192_RAB27A | 0.972 | 0.840 | 0.720 | 0.832 | 0.912 | 0.855 |
| EXOSC10_FCER1G | 0.992 | 0.880 | 0.520 | 0.944 | 0.939 | 0.855 |
| SETX_SQRDL | 0.965 | 0.940 | 0.520 | 0.913 | 0.936 | 0.855 |
| CEP192_MYD88 | 0.959 | 0.780 | 0.680 | 0.883 | 0.973 | 0.855 |
| ARID1A_BCL6 | 0.987 | 0.920 | 0.560 | 0.888 | 0.918 | 0.855 |
| EXOSC2_CD63 | 0.965 | 0.920 | 0.560 | 0.949 | 0.879 | 0.855 |
| AHCTF1_UPP1 | 0.974 | 0.760 | 0.640 | 0.974 | 0.924 | 0.855 |
| IMP3_RALB | 0.965 | 0.700 | 0.840 | 0.939 | 0.827 | 0.854 |
| ADK_SH3GLB1 | 0.979 | 1.000 | 0.760 | 0.878 | 0.655 | 0.854 |
| SUCLG2_CD63 | 0.995 | 0.960 | 0.680 | 0.923 | 0.712 | 0.854 |
| FNTA_WARS | 0.950 | 0.960 | 0.560 | 0.918 | 0.882 | 0.854 |
| EXOSC10_TUBA1B | 0.981 | 0.640 | 0.760 | 1.000 | 0.888 | 0.854 |
| IMP3_PCBP1 | 0.975 | 0.600 | 0.920 | 0.878 | 0.894 | 0.853 |
| ARID1A_GRINA | 0.941 | 0.940 | 0.520 | 0.929 | 0.936 | 0.853 |
| TTC17_PGD | 0.993 | 1.000 | 0.480 | 0.995 | 0.797 | 0.853 |
| ARID1A_TANK | 0.948 | 1.000 | 0.440 | 0.898 | 0.979 | 0.853 |
| CSNK1G2_FLII | 0.929 | 0.920 | 0.640 | 0.883 | 0.894 | 0.853 |
| CEP192_STAT3 | 0.973 | 0.900 | 0.640 | 0.939 | 0.812 | 0.853 |
| AHCTF1_SH3GLB1 | 0.956 | 0.620 | 0.720 | 0.980 | 0.985 | 0.852 |
| TTC17_SERPINB1 | 0.975 | 0.900 | 0.520 | 0.959 | 0.906 | 0.852 |
| EXOSC2_UPP1 | 0.957 | 0.980 | 0.560 | 0.888 | 0.876 | 0.852 |
| IMP3_TSPO | 0.980 | 0.520 | 0.880 | 0.985 | 0.894 | 0.852 |
| BCL11A_TNIP1 | 0.986 | 0.640 | 0.840 | 0.878 | 0.915 | 0.852 |
| ADSL_ENO1 | 0.988 | 0.920 | 0.640 | 0.862 | 0.848 | 0.852 |
| NOSIP_SQRDL | 0.948 | 0.800 | 0.680 | 0.990 | 0.839 | 0.851 |
| SERBP1_SH3GLB1 | 0.971 | 0.920 | 0.600 | 0.888 | 0.879 | 0.851 |
| ARID1A_NFKBIA | 0.993 | 0.940 | 0.680 | 0.791 | 0.852 | 0.851 |
| RPL9_ENO1 | 0.948 | 0.780 | 0.720 | 0.888 | 0.918 | 0.851 |
| ARID1A_RAB27A | 0.960 | 0.880 | 0.600 | 0.862 | 0.952 | 0.851 |
| RPL15_WARS | 0.950 | 1.000 | 0.840 | 0.974 | 0.488 | 0.851 |
| BCL11A_CSTB | 0.939 | 0.500 | 1.000 | 0.929 | 0.885 | 0.851 |
| ARID1A_SOCS3 | 0.964 | 0.980 | 0.600 | 0.760 | 0.948 | 0.850 |
| ARID1A_C3AR1 | 0.993 | 0.720 | 0.680 | 0.913 | 0.945 | 0.850 |
| RPL15_GPI | 0.980 | 0.780 | 0.800 | 0.990 | 0.700 | 0.850 |
| ARIH2_TNIP1 | 0.978 | 0.800 | 0.600 | 0.908 | 0.964 | 0.850 |
| TOP2B_TUBA1B | 0.957 | 0.680 | 0.720 | 0.985 | 0.906 | 0.849 |
| ZBED5_CD63 | 0.988 | 0.820 | 0.600 | 0.995 | 0.842 | 0.849 |
| TCF4_PGD | 0.993 | 0.840 | 0.760 | 0.918 | 0.733 | 0.849 |
| ARID1A_MYD88 | 0.950 | 0.860 | 0.560 | 0.929 | 0.945 | 0.849 |
| TTC17_FCER1G | 0.983 | 0.800 | 0.560 | 0.985 | 0.915 | 0.849 |
| BCL11A_POMP | 0.953 | 0.540 | 0.840 | 0.990 | 0.918 | 0.848 |
| ARID1A_UPP1 | 0.974 | 0.860 | 0.560 | 0.934 | 0.912 | 0.848 |
| ARID1A_ERLIN1 | 0.949 | 0.900 | 0.600 | 0.990 | 0.797 | 0.847 |
| MGEA5_SQRDL | 0.877 | 0.940 | 0.440 | 0.995 | 0.982 | 0.847 |
| NUP160_TPP1 | 0.990 | 0.500 | 0.880 | 0.903 | 0.961 | 0.847 |
| HLA-DPA1_CEBPB | 0.986 | 0.720 | 0.800 | 0.872 | 0.855 | 0.847 |
| RPL9_SERPINB1 | 0.952 | 0.840 | 0.640 | 0.857 | 0.942 | 0.846 |
| SETX_CD63 | 0.973 | 0.820 | 0.600 | 0.898 | 0.939 | 0.846 |
| RPL9_LDHA | 0.960 | 0.780 | 0.600 | 0.908 | 0.982 | 0.846 |
| EXOSC10_SERPINB1 | 0.982 | 0.960 | 0.520 | 0.929 | 0.839 | 0.846 |
| EXOSC10_PGD | 0.995 | 1.000 | 0.560 | 0.964 | 0.709 | 0.846 |
| EXOSC10_RALB | 0.969 | 0.900 | 0.600 | 0.944 | 0.815 | 0.846 |
| EXOSC10_TSPO | 0.981 | 0.880 | 0.560 | 0.969 | 0.836 | 0.845 |
| ARID1A_CD55 | 0.976 | 0.820 | 0.640 | 0.821 | 0.970 | 0.845 |
| CHN2_FCER1G | 0.972 | 0.920 | 0.520 | 0.827 | 0.988 | 0.845 |
| LY9_MYD88 | 0.958 | 0.620 | 0.800 | 0.944 | 0.903 | 0.845 |
| ARID1A_BCL3 | 0.979 | 0.940 | 0.600 | 0.745 | 0.961 | 0.845 |
| ARID1A_ETV6 | 0.944 | 0.880 | 0.560 | 0.918 | 0.921 | 0.845 |
| IRF8_LAP3 | 0.933 | 0.660 | 0.960 | 0.791 | 0.879 | 0.844 |
| TCF4_CD63 | 0.986 | 0.840 | 0.680 | 0.883 | 0.833 | 0.844 |
| FBXO11_MYD88 | 0.915 | 0.780 | 0.600 | 0.934 | 0.994 | 0.844 |
| TMEM106B_CEBPB | 0.974 | 0.960 | 0.640 | 0.765 | 0.882 | 0.844 |
| RPL9_PGD | 0.979 | 0.820 | 0.680 | 0.872 | 0.870 | 0.844 |
| ZNF266_CD63 | 0.976 | 0.820 | 0.640 | 0.995 | 0.788 | 0.844 |
| CCR7_CEBPB | 0.945 | 0.620 | 0.760 | 0.923 | 0.970 | 0.844 |
| CEP192_SQRDL | 0.965 | 0.760 | 0.600 | 0.974 | 0.918 | 0.844 |
| ARID1A_PRKCD | 0.982 | 0.760 | 0.600 | 0.990 | 0.885 | 0.843 |
| FBXO11_SH3GLB1 | 0.926 | 0.760 | 0.560 | 0.969 | 1.000 | 0.843 |
| IMP3_PRKCD | 0.972 | 0.700 | 0.800 | 0.959 | 0.785 | 0.843 |
| EXOSC10_GPI | 0.964 | 0.760 | 0.600 | 0.985 | 0.906 | 0.843 |
| CEP192_UPP1 | 0.988 | 0.840 | 0.560 | 0.888 | 0.939 | 0.843 |
| BCL11A_GNG5 | 0.975 | 0.640 | 0.680 | 0.969 | 0.948 | 0.843 |
| ARIH2_SH3GLB1 | 0.947 | 0.680 | 0.640 | 0.985 | 0.961 | 0.843 |
| TOP2B_TPP1 | 0.992 | 0.640 | 0.680 | 0.985 | 0.915 | 0.842 |
| SEH1L_SQRDL | 0.961 | 0.820 | 0.600 | 0.883 | 0.942 | 0.841 |
| ARID1A_FCER1G | 0.980 | 0.780 | 0.520 | 0.959 | 0.967 | 0.841 |
| EXOSC10_ERLIN1 | 0.986 | 1.000 | 0.520 | 0.980 | 0.715 | 0.840 |
| ARID1A_RTN4 | 0.988 | 0.800 | 0.600 | 0.954 | 0.858 | 0.840 |
| HERC6_LAP3 | 0.907 | 0.840 | 0.560 | 0.913 | 0.979 | 0.840 |
| ARID1A_FLOT1 | 0.980 | 0.920 | 0.560 | 0.913 | 0.824 | 0.839 |
| TCF4_PRKCD | 0.993 | 0.760 | 0.800 | 0.898 | 0.742 | 0.839 |
| LY9_PLAUR | 0.971 | 0.640 | 0.760 | 0.852 | 0.970 | 0.839 |
| ARID1A_NUMB | 0.965 | 0.860 | 0.520 | 0.929 | 0.918 | 0.838 |
| TRAF3IP3_WARS | 0.949 | 0.760 | 0.600 | 0.929 | 0.955 | 0.838 |
| CEP192_SH3GLB1 | 0.965 | 0.720 | 0.600 | 0.918 | 0.988 | 0.838 |
| AHCTF1_PGD | 0.991 | 0.680 | 0.720 | 0.974 | 0.824 | 0.838 |
| EXOSC2_SQRDL | 0.924 | 0.880 | 0.520 | 0.974 | 0.891 | 0.838 |
| FBXO11_CD63 | 0.950 | 0.760 | 0.520 | 0.964 | 0.994 | 0.838 |
| PCID2_POMP | 0.957 | 0.520 | 0.760 | 0.954 | 0.997 | 0.838 |
| TTC17_FGR | 0.992 | 0.920 | 0.520 | 1.000 | 0.755 | 0.837 |
| TROVE2_CEBPB | 0.979 | 0.980 | 0.600 | 0.765 | 0.861 | 0.837 |
| ARID1A_RALB | 0.965 | 0.840 | 0.560 | 0.944 | 0.876 | 0.837 |
| BCL11A_SQRDL | 0.973 | 0.620 | 0.680 | 0.969 | 0.939 | 0.836 |
| IMP3_SERPINB1 | 0.975 | 0.720 | 0.640 | 0.918 | 0.927 | 0.836 |
| LY9_POMP | 0.966 | 0.540 | 0.760 | 0.985 | 0.930 | 0.836 |
| CLIP4_CEBPB | 0.960 | 0.660 | 0.600 | 0.959 | 1.000 | 0.836 |
| RPS4X_SPI1 | 0.952 | 0.680 | 0.720 | 0.923 | 0.903 | 0.836 |
| BCL11A_FCER1G | 0.990 | 0.620 | 0.640 | 0.995 | 0.930 | 0.835 |
| EXOSC2_FCER1G | 0.963 | 0.800 | 0.600 | 0.918 | 0.891 | 0.835 |
| AHCTF1_CD63 | 0.987 | 0.520 | 0.760 | 0.974 | 0.930 | 0.834 |
| ARIH2_SQRDL | 0.943 | 0.740 | 0.600 | 0.985 | 0.900 | 0.834 |
| CEP192_LDHA | 0.952 | 0.680 | 0.640 | 0.918 | 0.976 | 0.833 |
| FBXO11_SERPINB1 | 0.943 | 0.820 | 0.480 | 0.944 | 0.976 | 0.832 |
| IL10RA_TNIP1 | 0.980 | 0.840 | 0.640 | 0.923 | 0.779 | 0.832 |
| CEP192_GNG5 | 0.964 | 0.660 | 0.680 | 0.872 | 0.985 | 0.832 |
| ARHGAP17_CD63 | 0.998 | 0.960 | 0.640 | 0.745 | 0.818 | 0.832 |
| CNOT7_FCER1G | 0.996 | 0.920 | 0.520 | 0.867 | 0.858 | 0.832 |
| ARIH2_G6PD | 0.980 | 0.600 | 0.680 | 0.995 | 0.906 | 0.832 |
| NUP160_WAS | 0.960 | 0.540 | 0.800 | 0.908 | 0.952 | 0.832 |
| LY9_CD63 | 0.989 | 0.500 | 0.800 | 0.980 | 0.891 | 0.832 |
| BCL11A_SH3GLB1 | 0.980 | 0.540 | 0.720 | 0.959 | 0.961 | 0.832 |
| ASXL2_WARS | 0.920 | 0.680 | 0.680 | 0.888 | 0.991 | 0.832 |
| FBL_SQRDL | 0.959 | 1.000 | 0.520 | 0.995 | 0.685 | 0.832 |
| CD52_CD63 | 0.993 | 0.800 | 0.680 | 0.929 | 0.758 | 0.832 |
| ADSL_POMP | 0.972 | 0.900 | 0.520 | 0.796 | 0.970 | 0.832 |
| SERBP1_CD63 | 0.991 | 0.980 | 0.520 | 0.888 | 0.779 | 0.831 |
| ARID1A_POMP | 0.933 | 0.800 | 0.520 | 0.969 | 0.933 | 0.831 |
| CHN2_SQRDL | 0.929 | 1.000 | 0.480 | 0.770 | 0.976 | 0.831 |
| ARIH2_UPP1 | 0.970 | 0.800 | 0.480 | 0.990 | 0.915 | 0.831 |
| CEP192_VAMP3 | 0.972 | 0.680 | 0.640 | 0.908 | 0.955 | 0.831 |
| BCL11A_TANK | 0.979 | 0.420 | 0.880 | 0.908 | 0.967 | 0.831 |
| GLG1_SQRDL | 0.961 | 0.880 | 0.560 | 0.913 | 0.839 | 0.831 |
| IRF8_WARS | 0.966 | 0.580 | 0.960 | 0.862 | 0.785 | 0.831 |
| HLA-DPA1_WARS | 0.983 | 0.720 | 0.840 | 0.918 | 0.691 | 0.830 |
| DNAJC10_SQRDL | 0.952 | 0.940 | 0.560 | 0.781 | 0.918 | 0.830 |
| ARID1A_FGR | 0.989 | 0.820 | 0.560 | 0.944 | 0.836 | 0.830 |
| RPL9_TRIB1 | 0.952 | 0.780 | 0.680 | 0.806 | 0.927 | 0.829 |
| LY9_UPP1 | 0.979 | 0.600 | 0.720 | 0.964 | 0.882 | 0.829 |
| IL10RA_MYD88 | 0.963 | 0.740 | 0.640 | 0.985 | 0.815 | 0.829 |
| METAP1_RTN4 | 0.965 | 0.680 | 0.640 | 0.959 | 0.891 | 0.827 |
| BCL11A_RALB | 0.982 | 0.560 | 0.760 | 0.990 | 0.842 | 0.827 |
| ARID1A_ATP2A2 | 0.911 | 0.860 | 0.440 | 0.923 | 0.997 | 0.826 |
| SERBP1_SQRDL | 0.967 | 0.900 | 0.560 | 0.918 | 0.785 | 0.826 |
| MLLT10_CD63 | 0.964 | 0.720 | 0.480 | 0.974 | 0.988 | 0.825 |
| PCID2_CD63 | 0.975 | 0.600 | 0.600 | 0.954 | 0.997 | 0.825 |
| ARID1A_FLII | 0.936 | 0.600 | 0.760 | 0.903 | 0.924 | 0.825 |
| EXOSC10_VAMP3 | 0.969 | 0.640 | 0.640 | 0.939 | 0.924 | 0.822 |
| CEP192_NFIL3 | 0.980 | 0.920 | 0.440 | 0.801 | 0.970 | 0.822 |
| ARID1A_HCK | 0.961 | 0.700 | 0.560 | 0.964 | 0.924 | 0.822 |
| IMP3_SPI1 | 0.986 | 0.480 | 0.840 | 0.934 | 0.870 | 0.822 |
| PCID2_SQRDL | 0.934 | 0.560 | 0.640 | 0.974 | 1.000 | 0.822 |
| MLLT10_PGD | 0.957 | 0.760 | 0.480 | 0.969 | 0.942 | 0.822 |
| ARID1A_PLAUR | 0.956 | 0.860 | 0.560 | 0.745 | 0.988 | 0.822 |
| TCF4_HCK | 0.970 | 0.600 | 0.800 | 0.944 | 0.794 | 0.821 |
| TCF4_VAMP3 | 0.977 | 0.580 | 0.800 | 0.913 | 0.836 | 0.821 |
| EXOSC10_FGR | 0.991 | 0.980 | 0.520 | 0.934 | 0.682 | 0.821 |
| ADSL_CD63 | 0.990 | 0.940 | 0.480 | 0.801 | 0.894 | 0.821 |
| CEP192_BCL6 | 0.995 | 0.780 | 0.520 | 0.867 | 0.942 | 0.821 |
| RPL9_TSPO | 0.950 | 0.660 | 0.720 | 0.816 | 0.958 | 0.821 |
| FBXO11_FCER1G | 0.950 | 0.720 | 0.520 | 0.944 | 0.970 | 0.821 |
| HLA-DPA1_MYD88 | 0.980 | 0.660 | 0.800 | 0.898 | 0.764 | 0.820 |
| CEP192_CD63 | 0.991 | 0.700 | 0.560 | 0.929 | 0.921 | 0.820 |
| EXOSC2_PGD | 0.971 | 0.940 | 0.480 | 0.944 | 0.764 | 0.820 |
| EXOSC2_SH3GLB1 | 0.938 | 0.880 | 0.480 | 0.888 | 0.912 | 0.820 |
| EXOSC10_SLAMF7 | 0.979 | 1.000 | 0.480 | 0.908 | 0.730 | 0.819 |
| ARID1A_GNG5 | 0.960 | 0.820 | 0.440 | 0.903 | 0.973 | 0.819 |
| CEP192_FCER1G | 0.989 | 0.720 | 0.520 | 0.934 | 0.927 | 0.818 |
| ARID1A_CCND3 | 0.962 | 0.600 | 0.600 | 0.954 | 0.973 | 0.818 |
| CEP192_PGD | 0.995 | 0.720 | 0.600 | 0.969 | 0.803 | 0.818 |
| SERTAD2_SQRDL | 0.969 | 0.640 | 0.760 | 0.878 | 0.839 | 0.817 |
| ASXL2_SH3GLB1 | 0.943 | 0.600 | 0.640 | 0.903 | 1.000 | 0.817 |
| BCL11A_UPP1 | 0.989 | 0.640 | 0.640 | 0.934 | 0.882 | 0.817 |
| ARID1A_TSPO | 0.973 | 0.660 | 0.520 | 1.000 | 0.930 | 0.817 |
| ASXL2_IRF1 | 0.912 | 0.860 | 0.560 | 0.750 | 1.000 | 0.816 |
| TROVE2_SQRDL | 0.962 | 0.940 | 0.600 | 0.816 | 0.764 | 0.816 |
| IMP3_C3AR1 | 0.994 | 0.580 | 0.680 | 0.867 | 0.961 | 0.816 |
| BCL11A_NFIL3 | 0.982 | 0.620 | 0.640 | 0.903 | 0.936 | 0.816 |
| TROVE2_SH3GLB1 | 0.977 | 0.900 | 0.520 | 0.837 | 0.845 | 0.816 |
| RPL9_RTN4 | 0.994 | 0.760 | 0.760 | 0.867 | 0.697 | 0.816 |
| SERTAD2_SH3GLB1 | 0.970 | 0.640 | 0.680 | 0.903 | 0.885 | 0.816 |
| ASXL2_BCL6 | 0.975 | 0.580 | 0.680 | 0.852 | 0.991 | 0.816 |
| ASXL2_CEBPB | 0.964 | 0.680 | 0.560 | 0.872 | 1.000 | 0.815 |
| HLA-DPA1_LAP3 | 0.950 | 0.760 | 0.800 | 0.786 | 0.779 | 0.815 |
| CEP192_SERPINB1 | 0.973 | 0.740 | 0.560 | 0.908 | 0.891 | 0.814 |
| SETX_SH3GLB1 | 0.963 | 0.800 | 0.480 | 0.872 | 0.955 | 0.814 |
| IL10RA_SH3GLB1 | 0.963 | 0.680 | 0.560 | 0.980 | 0.882 | 0.813 |
| RPL9_VAMP3 | 0.959 | 0.520 | 0.760 | 0.847 | 0.976 | 0.812 |
| TROVE2_CD63 | 0.985 | 0.940 | 0.560 | 0.821 | 0.755 | 0.812 |
| CEP192_ACSL4 | 0.983 | 0.740 | 0.560 | 0.939 | 0.833 | 0.811 |
| ASXL2_CD63 | 0.975 | 0.580 | 0.600 | 0.903 | 0.997 | 0.811 |
| USP34_CD63 | 0.947 | 0.560 | 0.560 | 0.980 | 1.000 | 0.809 |
| ASXL2_UPP1 | 0.964 | 0.680 | 0.560 | 0.857 | 0.985 | 0.809 |
| ASXL2_TSPO | 0.962 | 0.660 | 0.520 | 0.908 | 0.994 | 0.809 |
| CEP192_ERLIN1 | 0.946 | 0.800 | 0.560 | 0.959 | 0.779 | 0.809 |
| TCF4_TSPO | 0.983 | 0.600 | 0.800 | 0.842 | 0.818 | 0.809 |
| ARIH2_FCER1G | 0.974 | 0.540 | 0.600 | 0.969 | 0.958 | 0.808 |
| ARID1A_SORT1 | 0.973 | 0.760 | 0.560 | 0.959 | 0.788 | 0.808 |
| FNTA_G6PD | 0.967 | 0.780 | 0.520 | 0.913 | 0.855 | 0.807 |
| RPL9_SPI1 | 0.967 | 0.500 | 0.720 | 0.888 | 0.958 | 0.806 |
| ARIH2_PGD | 0.982 | 0.680 | 0.640 | 0.985 | 0.742 | 0.806 |
| TRAF3IP3_SQRDL | 0.958 | 0.560 | 0.560 | 0.969 | 0.982 | 0.806 |
| TTC17_TSPO | 0.975 | 0.780 | 0.400 | 1.000 | 0.873 | 0.806 |
| ASXL2_FGR | 0.975 | 0.660 | 0.560 | 0.908 | 0.924 | 0.805 |
| LY9_PGD | 0.988 | 0.500 | 0.760 | 0.990 | 0.788 | 0.805 |
| ARID1A_TIMP2 | 0.963 | 0.720 | 0.480 | 0.913 | 0.948 | 0.805 |
| PCID2_SH3GLB1 | 0.951 | 0.540 | 0.600 | 0.934 | 1.000 | 0.805 |
| ARID1A_ATP6V1B2 | 0.976 | 0.720 | 0.520 | 0.959 | 0.848 | 0.805 |
| BCL11A_CD63 | 0.994 | 0.520 | 0.640 | 0.954 | 0.912 | 0.804 |
| ARID1A_RBMS1 | 0.974 | 0.740 | 0.480 | 0.878 | 0.942 | 0.803 |
| HLA-DPA1_SQRDL | 0.976 | 0.700 | 0.760 | 0.862 | 0.715 | 0.803 |
| IMP3_LDHA | 0.970 | 0.700 | 0.400 | 0.964 | 0.976 | 0.802 |
| CNOT7_PGD | 0.999 | 0.980 | 0.480 | 0.867 | 0.679 | 0.801 |
| IRF8_SQRDL | 0.972 | 0.620 | 0.720 | 0.852 | 0.839 | 0.801 |
| ASXL2_TCIRG1 | 0.954 | 0.600 | 0.600 | 0.883 | 0.967 | 0.801 |
| BCL11A_MYD88 | 0.966 | 0.420 | 0.680 | 0.985 | 0.942 | 0.799 |
| CCR7_SQRDL | 0.942 | 0.440 | 0.680 | 0.985 | 0.942 | 0.798 |
| ASXL2_G6PD | 0.956 | 0.520 | 0.680 | 0.832 | 1.000 | 0.798 |
| ARID1A_SPI1 | 0.978 | 0.580 | 0.560 | 0.918 | 0.948 | 0.797 |
| ARID1A_VAMP3 | 0.959 | 0.540 | 0.600 | 0.934 | 0.945 | 0.796 |
| AHCTF1_BCL6 | 0.995 | 0.580 | 0.480 | 0.969 | 0.952 | 0.795 |
| ASXL2_KIF1B | 0.975 | 0.680 | 0.600 | 0.929 | 0.791 | 0.795 |
| ASXL2_FCER1G | 0.972 | 0.540 | 0.560 | 0.903 | 1.000 | 0.795 |
| IL10RA_SQRDL | 0.959 | 0.680 | 0.560 | 0.980 | 0.791 | 0.794 |
| ASXL2_PGD | 0.979 | 0.540 | 0.560 | 0.923 | 0.964 | 0.793 |
| CEP192_FGR | 0.993 | 0.700 | 0.600 | 0.923 | 0.748 | 0.793 |
| ASXL2_SQRDL | 0.934 | 0.660 | 0.440 | 0.923 | 1.000 | 0.792 |
| BCL11A_LDHA | 0.969 | 0.560 | 0.520 | 0.959 | 0.942 | 0.790 |
| IRF8_POMP | 0.963 | 0.560 | 0.680 | 0.847 | 0.897 | 0.789 |
| BCL11A_PGD | 0.994 | 0.520 | 0.680 | 0.969 | 0.782 | 0.789 |
| ARID1A_JUNB | 0.981 | 0.800 | 0.520 | 0.648 | 0.994 | 0.789 |
| CEP192_TSPO | 0.984 | 0.500 | 0.640 | 0.934 | 0.882 | 0.788 |
| ASXL2_SERPINB1 | 0.954 | 0.660 | 0.440 | 0.883 | 0.997 | 0.787 |
| BCL11A_BCL6 | 0.998 | 0.560 | 0.520 | 0.964 | 0.888 | 0.786 |
| FBXO11_PGD | 0.962 | 0.660 | 0.440 | 0.974 | 0.885 | 0.784 |
| BCL11A_SERPINB1 | 0.985 | 0.440 | 0.680 | 0.944 | 0.870 | 0.784 |
| BCL11A_ERLIN1 | 0.979 | 0.580 | 0.680 | 0.964 | 0.712 | 0.783 |
| ASXL2_ETV6 | 0.928 | 0.540 | 0.520 | 0.923 | 0.991 | 0.780 |
| ASXL2_RALB | 0.952 | 0.540 | 0.480 | 0.944 | 0.985 | 0.780 |
| USP34_PGD | 0.960 | 0.560 | 0.400 | 0.980 | 1.000 | 0.780 |
| ARID1A_PCBP1 | 0.965 | 0.660 | 0.480 | 0.847 | 0.933 | 0.777 |
| EXOSC2_TSPO | 0.954 | 0.720 | 0.400 | 0.944 | 0.861 | 0.776 |
| CEP192_PRKCD | 0.993 | 0.440 | 0.720 | 0.959 | 0.761 | 0.774 |
| IRF8_SH3GLB1 | 0.985 | 0.460 | 0.680 | 0.791 | 0.933 | 0.770 |
| ARIH2_CD63 | 0.983 | 0.440 | 0.520 | 1.000 | 0.900 | 0.769 |
| ARID1A_RAB7A | 0.962 | 0.680 | 0.440 | 0.934 | 0.827 | 0.769 |
| TTC17_VAMP3 | 0.968 | 0.560 | 0.400 | 0.990 | 0.924 | 0.768 |
| ARID1A_WAS | 0.982 | 0.620 | 0.400 | 0.908 | 0.879 | 0.758 |
| TTC17_WAS | 0.994 | 0.580 | 0.360 | 1.000 | 0.839 | 0.755 |
| HLA-DPA1_POMP | 0.974 | 0.380 | 0.720 | 0.872 | 0.821 | 0.754 |

TABLE 36
TOP PERFORMING (BASED ON AUC) INSIRS DERIVED
BIOMARKERS FOLLOWING A GREEDY SEARCH ON A
COMBINED DATASET
The top derived biomarker was ENTPD1:ARL6IP5 with an AUC of 0.898.
Incremental AUC increases can be made with the addition of further
derived biomarkers as indicated.

| Derived Biomarker | AUC | Increased AUC |
|---|---|---|
| ENTPD1_ARL6IP5 | 0.898 | 0.037 |
| TNFSF8_HEATR1 | 0.935 | 0.013 |
| ADAM19_POLR2A | 0.948 | 0.007 |
| SYNE2_VPS13C | 0.955 | 0.004 |
| TNFSF8_NIP7 | 0.959 | 0.002 |
| CDA_EFHD2 | 0.962 | 0.000 |
| ADAM19_MLLT10 | 0.962 | 0.000 |
| PTGS1 + ENTPD1 | 0.962 | 0.001 |
| ADAM19_EXOC7 | 0.963 | 0.002 |
| CDA_PTGS1 | 0.965 | −0.965 |

TABLE 37
INSIRS NUMERATORS AND DENOMINATORS APPEARING MORE
THAN TWICE IN THE 164 DERIVED BIOMARKERS WITH A MEAN
AUC > 0.82 IN THE VALIDATION DATASETS.
inSIRS numerators and denominators appearing more than once in
derived biomarkers with an AUC > 0.85

| Numerator | # | Denominator | # |
|---|---|---|---|
| TNFSF8 | 90 | MACF1 | 8 |
| ADAM19 | 17 | ARL6IP5 | 6 |
| VNN3 | 12 | TRAPPC2 | 5 |
| RGS2 | 11 | KRIT1 | 3 |
| GAB2 | 8 | RBM26 | 3 |
| STK17B | 4 | SYT11 | 3 |
| ENTPD1 | 3 | YTHDC2 | 3 |
| IGF2R | 3 | CDKN1B | 2 |
| SYNE2 | 3 | CYSLTR1 | 2 |
| CDA | 2 | FCF1 | 2 |
| MXD1 | 2 | LARP1 | 2 |
| | | MLLT10 | 2 |
| | | PHC3 | 2 |
| | | S100PBP | 2 |
| | | THOC2 | 2 |
| | | ZNF507 | 2 |

TABLE 38
TABLE OF INDIVIDUAL PERFORMANCE, IN DESCENDING AUC, OF 164 INSIRS DERIVED BIOMARKERS WITH
AN AVERAGE AUC >0.82 ACROSS EACH OF SIX NON-INFECTIOUS SYSTEMIC INFLAMMATION DATASETS.

| | Children | | | | Acute | Adult | |
|---|---|---|---|---|---|---|---|
| | Sepsis/ | Auto- | | | Respiratory | Sepsis/ | |
| | SIRS | immunity | Trauma | Anaphylaxis | Inflammation | SIRS | |
| Derived Biomarker | GAPPSS | GSE17755 | GSE36809 | GSE47655 | GSE63990 | GSE74224 | MEAN |
| TNFSF8_VEZT | 0.885 | NA | 0.987 | 0.951 | 0.816 | 0.926 | 0.904 |
| TNFSF8_HEATR1 | 0.882 | NA | 0.978 | 0.840 | 0.897 | 0.907 | 0.893 |
| TNFSF8_THOC2 | 0.939 | NA | 0.977 | 0.852 | 0.780 | 0.936 | 0.889 |
| TNFSF8_NIP7 | 0.897 | NA | 0.947 | 0.840 | 0.823 | 0.961 | 0.885 |
| TNFSF8_MLLT10 | 0.859 | NA | 0.966 | 0.901 | 0.819 | 0.905 | 0.882 |
| TNFSF8_EIF5B | 0.900 | NA | 0.994 | 0.926 | 0.766 | 0.873 | 0.882 |
| TNFSF8_LRRC8D | 0.927 | NA | 0.984 | 0.852 | 0.778 | 0.904 | 0.881 |
| TNFSF8_RNMT | 0.906 | NA | 0.994 | 0.914 | 0.741 | 0.889 | 0.879 |
| STK17B_ARL6IP5 | 0.948 | 0.988 | 0.996 | 0.901 | 0.537 | 0.927 | 0.879 |
| ENTPD1_ARL6IP5 | 0.858 | 0.974 | 1.000 | 0.951 | 0.621 | 0.899 | 0.878 |
| TNFSF8_CD84 | 0.885 | NA | 0.982 | 0.951 | 0.789 | 0.841 | 0.878 |
| TNFSF8_PWP1 | 0.861 | NA | 0.996 | 0.889 | 0.773 | 0.910 | 0.877 |
| TNFSF8_IPO7 | 0.879 | NA | 0.994 | 0.901 | 0.720 | 0.936 | 0.876 |
| ADAM19_EXOC7 | 0.942 | NA | 0.987 | 0.790 | 0.805 | 0.902 | 0.875 |
| TNFSF8_ARHGAP5 | 0.891 | NA | 0.989 | 0.975 | 0.643 | 0.909 | 0.874 |
| TNFSF8_RMND1 | 0.898 | NA | 0.983 | 0.877 | 0.775 | 0.877 | 0.874 |
| TNFSF8_IDE | 0.867 | NA | 0.964 | 0.852 | 0.796 | 0.931 | 0.873 |
| TNFSF8_TBCE | 0.900 | NA | 0.974 | 0.864 | 0.784 | 0.877 | 0.873 |
| TNFSF8_G3BP1 | 0.748 | NA | 0.991 | 0.914 | 0.834 | 0.919 | 0.873 |
| TNFSF8_CDK6 | 0.873 | NA | 0.993 | 0.840 | 0.783 | 0.916 | 0.872 |
| TNFSF8_MANEA | 0.885 | NA | 0.963 | 0.877 | 0.716 | 0.944 | 0.870 |
| TNFSF8_CKAP2 | 0.876 | NA | 0.972 | 0.926 | 0.683 | 0.927 | 0.869 |
| TNFSF8_ZNF507 | 0.870 | NA | 0.987 | 0.901 | 0.755 | 0.870 | 0.869 |
| TNFSF8_GGPS1 | 0.912 | NA | 0.954 | 0.827 | 0.797 | 0.892 | 0.868 |
| TNFSF8_XPO4 | 0.885 | NA | 0.985 | 0.877 | 0.717 | 0.924 | 0.867 |
| TNFSF8_PHC3 | 0.845 | NA | 0.983 | 0.864 | 0.823 | 0.863 | 0.867 |
| TNFSF8_ASCC3 | 0.879 | NA | 0.967 | 0.901 | 0.667 | 0.954 | 0.866 |
| TNFSF8_NOL10 | 0.876 | NA | 0.963 | 0.864 | 0.783 | 0.885 | 0.866 |
| TNFSF8_ANK3 | 0.879 | NA | 0.966 | 0.901 | 0.785 | 0.855 | 0.866 |
| TNFSF8_SMC3 | 0.888 | NA | 0.959 | 0.914 | 0.718 | 0.885 | 0.866 |
| TNFSF8_REPS1 | 0.924 | NA | 0.992 | 0.802 | 0.766 | 0.890 | 0.866 |
| TNFSF8_C14orf1 | 0.900 | NA | 0.972 | 0.840 | 0.766 | 0.892 | 0.866 |
| TNFSF8_FUT8 | 0.933 | NA | 0.994 | 0.914 | 0.622 | 0.907 | 0.866 |
| TNFSF8_VPS13A | 0.888 | NA | 0.978 | 0.877 | 0.728 | 0.897 | 0.865 |
| TNFSF8_RAD50 | 0.894 | NA | 0.993 | 0.852 | 0.755 | 0.865 | 0.864 |
| TNFSF8_ESF1 | 0.903 | NA | 0.990 | 0.901 | 0.734 | 0.824 | 0.862 |
| TNFSF8_MRPS10 | 0.880 | NA | 0.946 | 0.852 | 0.738 | 0.929 | 0.862 |
| CDA_EFHD2 | 0.976 | NA | 0.994 | 0.926 | 0.608 | 0.834 | 0.862 |
| TNFSF8_SLC35A3 | 0.861 | NA | 0.982 | 0.889 | 0.761 | 0.851 | 0.862 |
| ADAM19_TMEM87A | 0.942 | NA | 0.999 | 0.864 | 0.657 | 0.878 | 0.861 |
| TNFSF8_LANCL1 | 0.891 | NA | 0.999 | 0.815 | 0.750 | 0.900 | 0.861 |
| ADAM19_ERCC4 | 0.936 | NA | 0.990 | 0.852 | 0.653 | 0.912 | 0.861 |
| TNFSF8_CD28 | 0.942 | NA | 1.000 | 0.840 | 0.692 | 0.870 | 0.860 |
| ADAM19_MLLT10 | 0.939 | NA | 1.000 | 0.926 | 0.647 | 0.828 | 0.860 |
| TNFSF8_IQCB1 | 0.903 | NA | 0.963 | 0.852 | 0.711 | 0.907 | 0.860 |
| TNFSF8_FASTKD2 | 0.891 | NA | 0.995 | 0.877 | 0.680 | 0.897 | 0.859 |
| TNFSF8_RDX | 0.842 | NA | 0.921 | 0.790 | 0.801 | 0.968 | 0.858 |
| TNFSF8_MTO1 | 0.879 | NA | 0.969 | 0.877 | 0.713 | 0.894 | 0.858 |
| IQSEC1_MACF1 | 0.945 | NA | 0.994 | 0.877 | 0.663 | 0.845 | 0.858 |
| TNFSF8_SMC6 | 0.876 | NA | 0.951 | 0.926 | 0.684 | 0.887 | 0.858 |
| TNFSF8_NEK1 | 0.867 | NA | 0.963 | 0.914 | 0.765 | 0.813 | 0.857 |
| TNFSF8_ZNF562 | 0.855 | NA | 0.968 | 0.864 | 0.720 | 0.914 | 0.856 |
| TNFSF8_PEX1 | 0.897 | NA | 0.966 | 0.765 | 0.814 | 0.877 | 0.856 |
| ADAM19_SIDT2 | 0.952 | NA | 0.993 | 0.938 | 0.628 | 0.816 | 0.856 |
| TNFSF8_METTL5 | 0.939 | NA | 0.973 | 0.765 | 0.775 | 0.856 | 0.856 |
| CYP4F3_TRAPPC2 | 0.967 | NA | 0.903 | 0.926 | 0.706 | 0.814 | 0.855 |
| TNFSF8_KRIT1 | 0.864 | NA | 0.935 | 0.901 | 0.721 | 0.895 | 0.855 |
| TNFSF8_YEATS4 | 0.906 | NA | 0.947 | 0.877 | 0.736 | 0.843 | 0.855 |
| TNFSF8_CLUAP1 | 0.902 | NA | 0.980 | 0.877 | 0.672 | 0.885 | 0.854 |
| TNFSF8_LARP4 | 0.876 | NA | 0.979 | 0.753 | 0.767 | 0.939 | 0.854 |
| TNFSF8_SLC35D1 | 0.873 | NA | 0.996 | 0.802 | 0.743 | 0.895 | 0.854 |
| SYNE2_RBM26 | 0.897 | NA | 0.910 | 0.901 | 0.691 | 0.887 | 0.853 |
| TNFSF8_CD40LG | 0.888 | NA | 0.973 | 0.914 | 0.655 | 0.880 | 0.853 |
| VNN3_CYSLTR1 | 0.855 | NA | 0.972 | 0.963 | 0.713 | 0.792 | 0.852 |
| TNFSF8_SYT11 | 0.882 | NA | 0.927 | 0.778 | 0.770 | 0.934 | 0.852 |
| TNFSF8_RIOK2 | 0.888 | NA | 0.972 | 0.802 | 0.731 | 0.904 | 0.852 |
| TNFSF8_BZW2 | 0.918 | NA | 0.996 | 0.778 | 0.701 | 0.914 | 0.852 |
| TNFSF8_LARP1 | 0.830 | NA | 0.982 | 0.840 | 0.719 | 0.916 | 0.852 |
| ADAM19_SYT11 | 0.939 | NA | 1.000 | 0.815 | 0.599 | 0.932 | 0.851 |
| TNFSF8_NCBP1 | 0.877 | NA | 0.915 | 0.778 | 0.785 | 0.936 | 0.851 |
| ADAM19_MACF1 | 0.958 | NA | 1.000 | 0.827 | 0.592 | 0.914 | 0.851 |
| TNFSF8_NOL8 | 0.885 | NA | 0.993 | 0.864 | 0.629 | 0.929 | 0.851 |
| TNFSF8_KIAA0391 | 0.942 | NA | 0.922 | 0.802 | 0.745 | 0.880 | 0.851 |
| TNFSF8_HIBCH | 0.900 | NA | 0.919 | 0.815 | 0.813 | 0.834 | 0.850 |
| TNFSF8_MYO9A | 0.888 | NA | 0.951 | 0.827 | 0.697 | 0.927 | 0.849 |
| EXTL3_CYSLTR1 | 0.876 | NA | 0.951 | 0.889 | 0.784 | 0.780 | 0.849 |
| CLEC4E_ARL6IP5 | 0.800 | 0.977 | 0.998 | 0.938 | 0.511 | 0.904 | 0.849 |
| VNN3_MACF1 | 0.879 | NA | 0.950 | 0.914 | 0.706 | 0.828 | 0.849 |
| ADAM19_MTRR | 0.945 | NA | 0.993 | 0.790 | 0.584 | 0.956 | 0.849 |
| TNFSF8_SUPT7L | 0.891 | NA | 0.960 | 0.790 | 0.728 | 0.905 | 0.849 |
| ADAM19_TFIP11 | 0.958 | NA | 0.928 | 0.901 | 0.603 | 0.883 | 0.849 |
| TNFSF8_ARL6IP5 | 0.839 | NA | 0.967 | 0.852 | 0.681 | 0.932 | 0.848 |
| TNFSF8_ENOSF1 | 0.900 | NA | 0.983 | 0.802 | 0.756 | 0.846 | 0.848 |
| TNFSF8_ADSL | 0.939 | NA | 0.998 | 0.790 | 0.638 | 0.907 | 0.848 |
| TNFSF8_TGS1 | 0.864 | NA | 0.889 | 0.914 | 0.708 | 0.900 | 0.848 |
| GAB2_TRAPPC2 | 0.876 | NA | 0.988 | 0.914 | 0.577 | 0.910 | 0.848 |
| TNFSF8_NR2C1 | 0.924 | NA | 0.988 | 0.753 | 0.713 | 0.900 | 0.847 |
| TNFSF8_ZMYND11 | 0.858 | NA | 0.998 | 0.802 | 0.745 | 0.878 | 0.847 |
| TNFSF8_NGDN | 0.924 | NA | 0.973 | 0.864 | 0.689 | 0.819 | 0.847 |
| TNFSF8_PRKAB2 | 0.888 | NA | 0.981 | 0.778 | 0.737 | 0.890 | 0.847 |
| TNFSF8_MDH1 | 0.933 | NA | 0.980 | 0.802 | 0.626 | 0.931 | 0.847 |
| IGF2R_MACF1 | 0.912 | NA | 0.986 | 0.901 | 0.642 | 0.826 | 0.846 |
| ADAM19_RRAGC | 0.955 | NA | 0.941 | 0.914 | 0.543 | 0.910 | 0.846 |
| STK17B_YTHDC2 | 0.870 | NA | 0.990 | 0.926 | 0.551 | 0.919 | 0.846 |
| TNFSF8_GOLPH3L | 0.903 | NA | 0.991 | 0.840 | 0.625 | 0.910 | 0.846 |
| TNFSF8_BRCC3 | 0.879 | NA | 0.957 | 0.778 | 0.764 | 0.883 | 0.846 |
| TNFSF8_NFX1 | 0.888 | NA | 0.994 | 0.815 | 0.666 | 0.907 | 0.846 |
| VNN3_ATP8A1 | 0.845 | NA | 0.992 | 0.914 | 0.685 | 0.824 | 0.845 |
| TNFSF8_IKBKAP | 0.897 | NA | 0.989 | 0.778 | 0.671 | 0.929 | 0.845 |
| TNFSF8_TRIP11 | 0.864 | NA | 0.901 | 0.889 | 0.788 | 0.816 | 0.845 |
| RGS2_TRAPPC2 | 0.809 | NA | 0.959 | 0.963 | 0.612 | 0.905 | 0.845 |
| TNFSF8_TCF12 | 0.856 | NA | 0.958 | 0.778 | 0.721 | 0.944 | 0.845 |
| TNFSF8_WDR70 | 0.897 | NA | 0.981 | 0.704 | 0.791 | 0.887 | 0.845 |
| TNFSF8_KLHL20 | 0.870 | NA | 0.954 | 0.765 | 0.766 | 0.905 | 0.845 |
| CDA_PTGS1 | 0.939 | 0.770 | 0.983 | 0.951 | 0.546 | 0.912 | 0.845 |
| MXD1_TRAPPC2 | 0.836 | NA | 0.998 | 0.988 | 0.548 | 0.883 | 0.844 |
| RGS2_RBM26 | 0.809 | NA | 0.999 | 0.975 | 0.642 | 0.814 | 0.844 |
| IGF2R_NOTCH2 | 0.924 | NA | 0.962 | 0.963 | 0.551 | 0.863 | 0.844 |
| TNFSF8_HLTF | 0.882 | NA | 0.965 | 0.778 | 0.761 | 0.867 | 0.844 |
| TNFSF8_BCKDHB | 0.873 | NA | 0.919 | 0.815 | 0.797 | 0.858 | 0.844 |
| MXD1_RCBTB2 | 0.852 | NA | 0.979 | 0.963 | 0.581 | 0.885 | 0.844 |
| TNFSF8_AGA | 0.894 | NA | 0.894 | 0.815 | 0.728 | 0.922 | 0.843 |
| TNFSF8_AGPAT5 | 0.876 | NA | 0.999 | 0.815 | 0.671 | 0.892 | 0.843 |
| TNFSF8_TTC27 | 0.891 | NA | 0.997 | 0.802 | 0.658 | 0.902 | 0.842 |
| TNFSF8_TTC17 | 0.815 | NA | 0.918 | 0.802 | 0.769 | 0.938 | 0.842 |
| TNFSF8_S100PBP | 0.885 | NA | 0.971 | 0.889 | 0.605 | 0.900 | 0.842 |
| TNFSF8_PRPF39 | 0.879 | NA | 0.980 | 0.790 | 0.666 | 0.927 | 0.842 |
| TNFSF8_MACF1 | 0.845 | NA | 0.954 | 0.790 | 0.757 | 0.897 | 0.841 |
| ENTPD1_MACF1 | 0.791 | NA | 0.999 | 0.877 | 0.659 | 0.914 | 0.841 |
| MYH9_MACF1 | 0.855 | NA | 0.990 | 0.926 | 0.753 | 0.720 | 0.841 |
| ENTPD1_SYT11 | 0.764 | 0.868 | 0.999 | 0.901 | 0.630 | 0.907 | 0.841 |
| SYNE2_VPS13C | 0.885 | NA | 0.962 | 0.864 | 0.579 | 0.944 | 0.841 |
| VNN3_RAB11FIP2 | 0.852 | NA | 0.965 | 0.938 | 0.646 | 0.831 | 0.840 |
| GAB2_RNF170 | 0.906 | NA | 0.997 | 0.901 | 0.581 | 0.838 | 0.840 |
| ADAM19_PSMD5 | 0.945 | NA | 1.000 | 0.827 | 0.551 | 0.909 | 0.839 |
| ADAM19_DIAPH2 | 0.939 | NA | 0.974 | 0.877 | 0.500 | 0.926 | 0.839 |
| GAB2_FCF1 | 0.900 | NA | 0.980 | 0.889 | 0.566 | 0.880 | 0.838 |
| IGF2R_TCF7L2 | 0.900 | NA | 0.967 | 0.864 | 0.680 | 0.806 | 0.838 |
| VNN3_THOC2 | 0.839 | NA | 0.986 | 0.938 | 0.652 | 0.804 | 0.838 |
| ADAM19_PLCL2 | 0.939 | NA | 0.995 | 0.901 | 0.577 | 0.813 | 0.838 |
| ADAM19_LARP1 | 0.947 | NA | 0.998 | 0.827 | 0.579 | 0.865 | 0.837 |
| RGS2_MACF1 | 0.821 | NA | 0.976 | 0.840 | 0.673 | 0.900 | 0.837 |
| TNFSF8_RFC1 | 0.870 | NA | 0.967 | 0.840 | 0.673 | 0.867 | 0.837 |
| VNN3_CDKN1B | 0.861 | NA | 0.967 | 0.951 | 0.678 | 0.764 | 0.837 |
| ADAM19_POLR2A | 0.970 | NA | 0.996 | 0.778 | 0.576 | 0.899 | 0.837 |
| HEBP2_ARL6IP5 | 0.800 | 0.974 | 0.993 | 0.914 | 0.544 | 0.828 | 0.836 |
| VNN3_TIA1 | 0.852 | NA | 0.986 | 0.951 | 0.654 | 0.764 | 0.836 |
| RGS2_ATXN3 | 0.809 | NA | 0.993 | 1.000 | 0.624 | 0.780 | 0.835 |
| RGS2_CLOCK | 0.809 | NA | 0.997 | 0.951 | 0.572 | 0.875 | 0.835 |
| TNFSF8_EFTUD1 | 0.882 | NA | 0.986 | 0.753 | 0.685 | 0.902 | 0.835 |
| GAB2_KLHL24 | 0.891 | NA | 0.923 | 0.926 | 0.688 | 0.764 | 0.835 |
| VNN3_YTHDC2 | 0.858 | NA | 0.972 | 0.938 | 0.660 | 0.774 | 0.834 |
| VNN3_KRIT1 | 0.855 | NA | 0.971 | 0.951 | 0.657 | 0.769 | 0.834 |
| RGS2_S100PBP | 0.809 | NA | 0.992 | 0.963 | 0.542 | 0.883 | 0.834 |
| VNN3_TRAPPC2 | 0.848 | NA | 0.949 | 0.951 | 0.645 | 0.802 | 0.833 |
| GAB2_BTN2A1 | 0.915 | NA | 0.965 | 0.889 | 0.548 | 0.875 | 0.833 |
| ADAM19_HRH4 | 0.939 | NA | 0.983 | 0.926 | 0.608 | 0.740 | 0.833 |
| GAB2_ADRBK2 | 0.903 | NA | 0.995 | 0.889 | 0.517 | 0.887 | 0.832 |
| KCMF1_ARL6IP5 | 0.858 | 0.974 | 0.999 | 0.914 | 0.589 | 0.694 | 0.832 |
| VNN3_RBM26 | 0.842 | NA | 0.993 | 0.938 | 0.679 | 0.736 | 0.832 |
| ADAM19_SLCO3A1 | 0.945 | NA | 0.965 | 0.827 | 0.499 | 0.951 | 0.831 |
| STK17B_RABGAP1L | 0.892 | NA | 0.988 | 0.901 | 0.598 | 0.802 | 0.831 |
| GAB2_PRUNE | 0.906 | NA | 0.965 | 0.901 | 0.540 | 0.865 | 0.830 |
| RGS2_ZNF507 | 0.809 | NA | 0.998 | 0.938 | 0.602 | 0.818 | 0.829 |
| RGS2_ARHGEF6 | 0.809 | NA | 0.987 | 0.975 | 0.501 | 0.895 | 0.829 |
| RGS2_PHC3 | 0.809 | NA | 0.996 | 0.938 | 0.626 | 0.797 | 0.828 |
| GAB2_CREB1 | 0.891 | NA | 0.995 | 0.926 | 0.570 | 0.784 | 0.828 |
| VNN3_VPS13B | 0.845 | NA | 0.928 | 0.938 | 0.648 | 0.804 | 0.828 |
| PELI1_CDKN1B | 0.906 | NA | 0.923 | 0.963 | 0.490 | 0.880 | 0.827 |
| RGS2_YTHDC2 | 0.809 | NA | 0.980 | 0.864 | 0.628 | 0.865 | 0.825 |
| STK17B_TLK1 | 0.879 | NA | 0.972 | 0.901 | 0.473 | 0.909 | 0.823 |
| RGS2_FCF1 | 0.809 | NA | 0.968 | 0.951 | 0.576 | 0.826 | 0.823 |
| SYNE2_KRIT1 | 0.900 | NA | 0.800 | 0.926 | 0.650 | 0.855 | 0.822 |
| HAL_CPA3 | 0.835 | NA | 0.923 | 0.963 | 0.540 | 0.860 | 0.820 |

TABLE 39
INTERPRETATION OF RESULTS OBTAINED WHEN USING
A COMBINATION OF BASIRS AND BACTERIAL DETECTION

| | Bacterial Pathogen Antigen | |
|---|---|---|
| Host Immune Response | Positive | Negative |
| Positive | Confirmed BaSIRS | Organism did not grow? |
| | | Organism not present? |
| Negative | Contaminant? | Confirmed inSIRS |
| | Commensal? | |

TABLE 40
INTERPRETATION OF RESULTS OBTAINED WHEN USING
A COMBINATION OF VASIRS AND VIRUS DETECTION

| Host Immune | Viral Pathogen Antigen | |
|---|---|---|
| Response | Positive | Negative |
| Positive | Confirmed VaSIRS | Assay not sensitive enough? |
| | | Organism not present? |
| | | Not enough sample taken? |
| | | Wrong assay performed? |
| | | Antibodies not yet produced? |
| Negative | Commensal? | Confirmed inSIRS |
| | Residual antibody? | |

TABLE 41
INTERPRETATION OF RESULTS OBTAINED WHEN USING
A COMBINATION OF PASIRS AND PROTOZOAN DETECTION

| Host Immune | Protozoal Pathogen Antigen | |
|---|---|---|
| Response | Positive | Negative |
| Positive | Confirmed PaSIRS | Assay not sensitive enough? |
| | | Organism not present? |
| | | Not enough sample taken? |
| | | Wrong assay performed? |
| | | Antibodies not yet produced? |
| Negative | Commensal? | Confirmed inSIRS |
| | Residual antibody? | |

The application's sequence listing, which the Patent Office published only in electronic form, follows.

SEQUENCE LISTING (1576 sequences)

SEQ ID NO: 1 - DNA, 2757 bp, Homo sapiens;
atgccagggggcgcaggcgccgcccggctctgcttgctggcgtttgccctgcagcccctccggccgcgggcggcgcgggagcctggatggacaagaggaagtgaggaaggcagccccaagctgcagcatgaacttatcatacctcagtggaagacttcagaaagccccgtgagagaaaagcatccactcaaagctgagctcagggtaatggctgaggggcgagaactgatcctggacctggagaagaatgagcaactttttgctccttcctacacagaaacccattatacttcaagtggtaaccctcaaaccaccacacggaaattggaggatcactgcttttaccacggcacggtgagggagacagaactgtccagcgtcacgctcagcacttgccgaggaattagaggactgattacggtgagcagcaacctcagctacgtcatcgagcccctccctgacagcaagggccaacaccttatttacagatctgaacatctcaagccgcccccgggaaactgtgggttcgagcactccaagcccaccaccagggactgggctcttcagtttacacaacagaccaagaagcgacctcgcaggatgaaaagggaagatttaaactccatgaagtatgtggagctttacctcgtggctgattatttagagtttcagaagaatcgacgagaccaggacgccaccaaacacaagctcatagagatcgccaactatgttgataagttttaccgatccttgaacatccggattgctctcgtgggcttggaagtgtggacccacgggaacatgtgtgaagtttcagagaatccatattctaccctctggtcctttctcagttggaggcgcaagctgcttgcccagaagtaccatgacaacgcccaattaatcacgggcatgtccttccacggcaccaccatcggcctggcccccctcatggccatgtgctctgtgtaccagtctggaggagtcaacatggaccactccgagaatgccattggcgtggctgccaccatggcccacgagatgggccacaactttggcatgacccatgattctgcagattgctgctcggccagtgcggctgatggtgggtgcatcatggcagctgccactgggcacccctttcccaaagtgttcaatggatgcaacaggagggagctggacaggtatctgcagtcaggtggtggaatgtgtctctccaacatgccagacaccaggatgttgtatggaggccggaggtgtgggaacgggtatctggaagatggggaagagtgtgactgtggagaagaagaggaatgtaacaacccctgctgcaatgcctctaattgtaccctgaggccgggggcggagtgtgctcacggctcctgctgccaccagtgtaagctgttggctcctgggaccctgtgccgcgagcaggccaggcagtgtgacctcccggagttctgtacgggcaagtctccccactgccctaccaacttctaccagatggatggtaccccctgtgagggcggccaggcctactgctacaacggcatgtgcctcacctaccaggagcagtgccagcagctgtggggacccggagcccgacctgcccctgacctctgcttcgagaaggtgaatgtggcaggagacacctttggaaactgtggaaaggacatgaatggtgaacacaggaagtgcaacatgagagatgcgaagtgtgggaagatccagtgtcagagctctgaggcccggcccctggagtccaacgcggtgcccattgacaccactatcatcatgaatgggaggcagatccagtgccggggcacccacgtctaccgaggtcctgaggaggagggtgacatgctggacccagggctggtgatgactggaaccaagtgtggctacaaccatatttgctttgaggggcagtgcaggaacacctccttctttgaaactgaaggctgtgggaagaagtgcaatggccatggggtctgtaacaacaaccagaactgccactgcctgccgggctgggccccgcccttctgcaacacaccgggccacgggggcagtatcgacagtgggcctatgccccctgagagtgtgggtcctgtggtagctggagtgttggtggccatcttggtgctggcggtcctcatgctgatgtactactgctgcagacagaacaacaaactaggccaactcaagccctcagctctcccttccaagctgaggcaacagttcagttgtcccttcagggtttctcagaacagcgggactggtcatgccaacccaactttcaagctgcagacgccccagggcaagcgaaaggtgatcaacactccggaaatcctgcggaagccctcccagcctcctccccggccccctccagattatctgcgtggtgggtccccacctgcaccactgccagctcacctgagcagggctgctaggaactccccagggcccgggtctcaaatagagaggacggagtcgtccaggaggcctcctccaagccggccaattccccccgcaccaaattgcatcgtttcccaggacttctccaggcctcggccgccccagaaggcactcccggcaaacccagtgccaggccgcaggagcctccccaggccaggaggtgcatccccactgcggccccctggtgctggccctcagcagtcccggcctctggcagcacttgccccaaagtttccagaatacagatcacagagggctggagggatgattagctcgaaaatctag

SEQ ID NO: 2 - DNA, 558 bp, Homo sapiens;
atgaagctggtttccgtcgccctgatgtacctgggttcgctcgccttcctaggcgctgacaccgctcggttggatgtcgcgtcggagtttcgaaagaagtggaataagtgggctctgagtcgtgggaagagggaactgcggatgtccagcagctaccccaccgggctcgctgacgtgaaggccgggcctgcccagacccttattcggccccaggacatgaagggtgcctctcgaagccccgaagacagcagtccggatgccgcccgcatccgagtcaagcgctaccgccagagcatgaacaacttccagggcctccggagctttggctgccgcttcgggacgtgcacggtgcagaagctggcacaccagatctaccagttcacagataaggacaaggacaacgtcgcccccaggagcaagatcagcccccagggctacggccgccggcgccggcgctccctgcccgaggccggcccgggtcggactctggtgtcttctaagccacaagcacacggggctccagcccccccgagtggaagtgctccccactttctttag

SEQ ID NO: 3 - DNA, 1575 bp, Homo sapiens;
atgatttcaccattcttagtactggccattggcacctgccttactaactccttagtgccagagaaagagaaagaccccaagtactggcgagaccaagcgcaagagacactgaaatatgccctggagcttcagaagctcaacaccaacgtggctaagaatgtcatcatgttcctgggagatgggatgggtgtctccacagtgacggctgcccgcatcctcaagggtcagctccaccacaaccctggggaggagaccaggctggagatggacaagttccccttcgtggccctctccaagacgtacaacaccaatgcccaggtccctgacagtgccggcaccgccaccgcctacctgtgtggggtgaaggccaatgagggcaccgtgggggtaagcgcagccactgagcgttcccggtgcaacaccacccaggggaacgaggtcacctccatcctgcgctgggccaaggacgctgggaaatctgtgggcattgtgaccaccacgagagtgaaccatgccacccccagcgccgcctacgcccactcggctgaccgggactggtactcagacaacgagatgccccctgaggccttgagccagggctgtaaggacatcgcctaccagctcatgcataacatcagggacattgacgtgatcatggggggtggccggaaatacatgtaccccaagaataaaactgatgtggagtatgagagtgacgagaaagccaggggcacgaggctggacggcctggacctcgttgacacctggaagagcttcaaaccgagatacaagcactcccacttcatctggaaccgcacggaactcctgacccttgacccccacaatgtggactacctattgggtctcttcgagccaggggacatgcagtacgagctgaacaggaacaacgtgacggacccgtcactctccgagatggtggtggtggccatccagatcctgcggaagaaccccaaaggcttcttcttgctggtggaaggaggcagaattgaccacgggcaccatgaaggaaaagccaagcaggccctgcatgaggcggtggagatggaccgggccatcgggcaggcaggcagcttgacctcctcggaagacactctgaccgtggtcactgcggaccattcccacgtcttcacatttggtggatacaccccccgtggcaactctatctttggtctggcccccatgctgagtgacacagacaagaagcccttcactgccatcctgtatggcaatgggcctggctacaaggtggtgggcggtgaacgagagaatgtctccatggtggactatgctcacaacaactaccaggcgcagtctgctgtgcccctgcgccacgagacccacggcggggaggacgtggccgtcttctccaagggccccatggcgcacctgctgcacggcgtccacgagcagaactacgtcccccacgtgatggcgtatgcagcctgcatcggggccaacctcggccactgtgctcctgccagctcggcaggcagccttgctgcaggccccctgctgctcgcgctggccctctaccccctgagcgtcctgttctga

SEQ ID NO: 4 - DNA, 1074 bp, Homo sapiens;
atggcccgggagaacggcgagagcagctcctcctggaaaaagcaagctgaagacatcaagaagatcttcgagttcaaagagaccctcggaaccggggccttttccgaagtggttttagctgaagagaaggcaactggcaagctctttgctgtgaagtgtatccctaagaaggcgctgaagggcaaggaaagcagcatagagaatgagatagccgtcctgagaaagattaagcatgaaaatattgttgccctggaagacatttatgaaagcccaaatcacctgtacttggtcatgcagctggtgtccggtggagagctgtttgaccggatagtggagaaggggttttatacagagaaggatgccagcactctgatccgccaagtcttggacgccgtgtactatctccacagaatgggcatcgtccacagagacctcaagcccgaaaatctcttgtactacagtcaagatgaggagtccaaaataatgatcagtgactttggattgtcaaaaatggagggcaaaggagatgtgatgtccactgcctgtggaactccaggctatgtcgctcctgaagtcctcgcccagaaaccttacagcaaagccgttgactgctggtccatcggagtgattgcctacatcttgctctgcggctaccctcctttttatgatgaaaatgactccaagctctttgagcagatcctcaaggcggaatatgagtttgactctccctactgggatgacatctccgactctgcaaaagacttcattcggaacctgatggagaaggacccgaataaaagatacacgtgtgagcaggcagctcggcacccatggatcgctggtgacacagccctcaacaaaaacatccacgagtccgtcagcgcccagatccggaaaaactttgccaagagcaaatggagacaagcatttaatgccacggccgtcgtcagacatatgagaaaactacacctcggcagcagcctggacagttcaaatgcaagtgtttcgagcagcctcagtttggccagccaaaaagactgtgcgtatgtagcaaaaccagaatccctcagctga

SEQ ID NO: 5 - DNA, 2361 bp, Homo sapiens;
atgaagggaacaggcatcatggactgtgcgcccaaggcactcctggccagggcactttatgacaactgccctgactgctctgacgagctggctttcagcagaggggacatcctgaccattctggagcaacacgtgccagaaagcgagggttggtggaagtgtttgctccatgggaggcaaggcctggcccctgccaaccgcctccaaatcctcacggaggtcgctgcagacaggccgtgccccccattcctgagaggcctggaagaagctcctgccagctcagaggagacctatcaggtgcccactctaccccgccctcccactccaggccccgtttatgagcagatgaggagttgggcggaggggccccagccccctactgcccaagtctatgaattccccgaccctcccaccagtgccagaatcatctgtgaaaagactctcagctttccaaaacaggccatcctcacgcttcccagacctgtccgggcctcactgccgactctgccttcccaggtgtatgacgtgcctacccagcaccggggccccgtggtcctgaaggagccagagaagcagcagttatatgacataccagccagccccaagaaggcaggactccatcccccagacagccaagcaagtgggcagggtgttcccctgatatcagtgactaccttaagaagaggcggttacagcacattaccaaatcctcagaaatcggaatggatttatgacactccagtgtctccaggaaaggccagcgtcagaaacacgcctctcaccagctttgcggaagaatcaaggccccacgctctccccagttccagctccactttctacaatcctccaagtggcagatccaggtccctcactccacaactgaataacaatgtgcccatgcagaaaaaactcagccttccagaaattccttcttatggctttcttgtacccagaggcacatttcctttggatgaagatgtcagctacaaggttccttcaagctttctgattccccgagtggaacagcagaacaccaagcccaatatttatgacatccctaaagcaacgtcgagtgtttctcaggctgggaaggagctggagaaagccaaggaggtgtcagagaattccgcgggccataattcctcatggttctccagacggacaacttccccatctcctgaaccggacagattatcaggttccagttctgacagcagagctagcatcgtttcctcgtgctccaccacatccaccgacgactcctccagctcttcctcggaggagtcagcaaaggagctctccttggacctggatgtggccaaggagacagtgatggctctgcagcacaaggtggtcagctctgtcgctggcctgatgctctttgtcagcaggaagtggagattccgagactatctggaggccaacattgatgcaatccacaggtccactgatcacatagaagaatctgtaagagaatttctggattttgcccgaggagtccatgggactgcctgtaacctcactgacagtaaccttcagaacagaattcgggaccagatgcagaccatctccaactcctaccgcatcctgcttgaaacaaaggaaagcttggataatcgcaattggcctctggaagttcttgtgactgacagtgtccagaacagcccagatgaccttgagaggtttgtcatggtggcacggatgcttccagaagacatcaagaggtttgcctccattgtcattgccaatggaaggctcctttttaagcggaactgtgaaaaggaagagactgtgcagttgaccccaaatgcagaatttaagtgtgaaaaatacatccagcctccccaaagagaaactgaatcacaccaaaagagtaccccttccactaagcaaagggaagatgaacactcttctgaactattaaagaaaaatagggcaaatatctgtggacagaatcctggccctcttatacctcagccttcgagtcaacagactcctgagaggaaaccccgcttatctgaacactgccggctctactttggggcgctcttcaaagccatcagcgcatttcacggcagcctcagcagcagccagcccgcggagatcatcactcagagcaagctggtcatcatggtgggacagaagctggtggacacgctgtgcatggagacccaggagagggacgtgcgcaacgagatcctccgtggcagcagtcacctctgcagcctgctcaaggacgtagcgctggccactaagaatgccgtgctcacgtaccccagccctgccgcgctggggcacctccaggcggaggctgagaagctggagcaacacacgcggcagttcagagggacactgggatga

SEQ ID NO: 6 - DNA, 1476 bp, Homo sapiens;
atggatcacactgacaatgagttacaaggcactaatagttctggatccttgggtggtcttgatgttcgcagacgaattcctataaagctcatctccaaacaagcaaacaaagcgaaacctgcaccgcgaactcaaagaactataaacaggatgcctgcaaaggctccacctggtgatgaagaaggatttgattataatgaagaagaacggtatgactgtaaagggggtgagctgtttgcaaatcagcgaagatttcctggacaccttttttgggactttcagataaacatcttaggtgaaaaggatgatacaccagttcatttctgtgacaagtgtggattgcctattaaaatctatgggagaatgattccatgcaagcatgttttttgctatgactgtgctattttacatgaaaaaaagggagataagatgtgtccaggctgtagtgatcctgtgcagcgaattgagcagtgtacacgaggttctctcttcatgtgtagcattgttcaagggtgcaagagaacatatttgtctcagagagacttacaggctcatatcaaccatcgccatatgagagctggaaaacctgttacccgtgcttcacttgaaaatgttcatcctcctattgccccaccaccaactgaaatccctgagcgttttataatgccaccagacaagcaccatatgagccatattccgccaaagcagcacatcatgatgccaccacctcctttgcaacatgtgccacatgagcactataatcagccacatgaggatattcgtgctcctccagcagaattgtccatggctccacctccacctcgatcggtcagtcaggaaacctttcgtatttcaacaagaaaacacagcaatttaataaccgtccctattcaggatgactcaaattcaggtgctagagaaccaccacctcctgccccagcacctgctcaccatcatcctgaatatcagggtcaaccagtggtatcgcaccctcatcatattatgcctccacagcaacattatgcaccacccccacctcctccaccaccaataagccatccaatgccacatcctccccaggctgcaggtactcctcacttggtatatagccaagctccacctccaccaatgacctctgctccaccaccaataacccctccccctggacatattattgcccagatgccaccttatatgaatcatcctcctccaggacctcccccacctcaacatggtggtccacctgtaactgcaccccctcctcaccattataatcctaactcattaccccagttcactgaagatcaaggaactctgagccctccatttacacaaccagggggaatgagtcctggtatatggcctgcaccaagagggccaccaccacctccacgattgcagggtccgccttctcaaaccccacttcctggaccacatcatccagatcagacaagatatagaccgtattaccaatga

SEQ ID NO: 7 - DNA, 1743 bp, Homo sapiens;
atgaaggagaataaagaaaattcaagcccttcagtaacttcagcaaacctggaccacacaaagccatgttggtactgggataagaaagacttggctcatacaccctcacaacttgaaggacttgatccagccaccgaggcccggtaccgccgagagggcgctcggttcatctttgatgtgggcacacgtttggggctacactatgataccctggcaactggaataatttattttcatcgcttctatatgtttcattccttcaagcaattcccaagatatgtgacaggagcctgttgcctctttctggctgggaaagtagaagaaacaccaaaaaaatgtaaagatatcatcaaaacagctcgtagtttattaaatgatgtacaatttggccagtttggagatgacccaaaggaggaagtaatggttctggagagaatcttactgcagaccatcaagtttgatttacaggtagaacatccataccagttcctactaaaatatgcaaagcaactcaaaggtgataaaaacaaaattcaaaagttggttcaaatggcatggacatttgtaaatgacagtctctgcaccaccttgtcactgcagtgggaaccagagatcatagcagtagcagtgatgtatctcgcaggacgtttgtgcaaatttgaaatacaagaatggacctccaaacccatgtataggagatggtgggagcagtttgttcaagatgtcccggtcgacgttttggaagacatctgccaccaaatcctggatctttactcacaaggaaaacaacagatgcctcatcacaccccccatcagctgcaacagcccccatctcttcagcctacaccacaagtgccgcaagtacagcagtcacagccgtctcaaagctccgaaccatcccagccccagcagaaggacccccagcaaccagcccagcagcagcagccagcccaacagcccaagaaaccctctccgcagcccagttctccccgacaggttaagcgagccgtggttgtttctcccaaagaagagaacaaagcagcagaaccaccaccacctaaaatccccaaaattgagaccactcatccaccgttgcctccagcccacccacctccagaccggaagcctcccctcgctgctgccttaggtgaggctgagccgccgggccctgtggatgccactgacctccccaaagtccagattccccctccggcccacccggcccctgtgcaccagccaccgccgctgccacaccggcccccgcccccacccccctccagctacatgaccgggatgtccaccaccagctcctacatgtctggagagggctaccagagcctgcagtccatgatgaagaccgagggaccctcctacggtgccctgccccccgcctacggcccacctgcacacctgccctaccacccccatgtctacccgcccaacccgcccccgccacctgtgcctcctcccccagcctccttccccccacctgccatcccaccccctactcctggctaccccccacccccacccacctacaaccccaacttcccacccccacccccacgcctcccgcctacccacgcagtcccccctcatcctcctccagggttgggcctgccgccagccagctacccacctcctgccgtcccccctggaggacagcctcctgtgcccccgcccattcccccacccggcatgcctccagttggggggctggggcgggcagcctggatgagataa

SEQ ID NO: 8 - DNA, 804 bp, Homo sapiens;
atgggctcagcctgtatcaaagtcaccaaatactttctcttcctcttcaacttgatcttctttatcctgggcgcagtgatcctgggcttcggggtgtggatcctggccgacaagagcagtttcatctctgtcctgcaaacctcctccagctcgcttaggatgggggcctatgtcttcatcggcgtgggggcagtcactatgctcatgggcttcctgggctgcatcggcgccgtcaacgaggtccgctgcctgctggggctgtactttgctttcctgctcctgatcctcattgcccaggtgacggccggggccctcttctacttcaacatgggcaagctgaagcaggagatgggcggcatcgtgactgagctcattcgagactacaacagcagtcgcgaggacagcctgcaggatgcctgggactacgtgcaggctcaggtgaagtgctgcggctgggtcagcttctacaactggacagacaacgctgagctcatgaatcgccctgaggtcacctacccctgttcctgcgaagtcaagggggaagaggacaacagcctttctgtgaggaagggcttctgcgaggcccccggcaacaggacccagagtggcaaccaccctgaggactggcctgtgtaccaggagggctgcatggagaaggtgcaggcgtggctgcaggagaacctgggcatcatcctcggcgtgggcgtgggtgtggccatcatcgagctcctggggatggtcctgtccatctgcttgtgccggcacgtccattccgaagactacagcaaggtccccaagtactga

SEQ ID NO: 9 - DNA, 606 bp, Homo sapiens;
atggaatatcatcctgatttagaaaatttggatgaagatggatatactcaattacacttcgactctcaaagcaataccaggatagctgttgtttcagagaaaggatcgtgtgctgcatctcctccttggcgcctcattgctgtaattttgggaatcctatgcttggtaatactggtgatagctgtggtcctgggtaccatgggggttctttccagcccttgtcctcctaattggattatatatgagaagagctgttatctattcagcatgtcactaaattcctgggatggaagtaaaagacaatgctggcaactgggctctaatctcctaaagatagacagctcaaatgaattgggatttatagtaaaacaagtgtcttcccaacctgataattcattttggataggcctttctcggccccagactgaggtaccatggctctgggaggatggatcaacattctcttctaacttatttcagatcagaaccacagctacccaagaaaacccatctccaaattgtgtatggattcacgtgtcagtcatttatgaccaactgtgtagtgtgccctcatatagtatttgtgagaagaagttttcaatgtaa

SEQ ID NO: 10 - DNA, 2124 bp, Homo sapiens;
atggcggcggcggtagctgcggcgggtcggttaggctggttgttcgccgcgctctgcctgggcaacgccgcgggggaggccgcgccgggcccgcgagtgctgggcttctgcctggaggaggatggagcggcgggcgcgggttgggtacgcggaggggcggcgcgggacacgccggacgccaccttcctcctgcgcctcttcggcccgggcttcgccaacagctcttggtcctgggtggccccggagggggcgggctgccgggaggaggcggcctcccccgcgggcgagtggcgcgcgctgctgcgcttgcgcctgcgggccgaggccgtgcgcccgcactcggcgctgctggcggtgcgcgtggagccgggtggcggggcggctgaggaggcggcgccgccctgggctctgggcctgggggcggccgggctgctggcgctggcagcgctggcgcgaggcctgcagctgagcgcgctggcgctggcgcctgccgaggtgcaggtgctgcgcgagagcggctcggaggcggagcgtgcggcggcgcggcgtttggagcccgcgcggcgctgggccggctgcgccttgggcgcgctgctgctgctggccagcctggcgcaggcggcgctggcggtgctgctgtaccgcgcggccggccagcgtgcggtgcccgccgtgttgggcagcgcggggctcgtgttcctggtgggagaggtggtgccggccgccgtgagcgggcgctggacgctggcgctggcgccgcgagcgctcggcctcagccgcctggccgtcctgctcactctgcccgtcgcgctgcccgtggggcagctgctggagctggcggcgcggcccgggcggctgcgggagcgggtgctggagctggcgcgcggcggcggcgacccctacagcgatctcagcaagggcgtgctgcgctgccggaccgtggaggacgtgctcacgcccctcgaagactgcttcatgctggacgccagcaccgtgctggacttcggcgtcctggccagcatcatgcagagcggccacacgcgcatcccggtgtacgaggaggagcgctccaacatcgtggacatgctctacctcaaggacttggccttcgtggatcccgaagactgcacgccgctcagcaccatcactcgtttctacaaccatccgctccacttcgtcttcaacgacaccaagctggacgctgtcctggaggaattcaagcgagggaagtcccacctggccatcgtgcagaaggtgaacaacgagggtgaaggcgaccccttctacgaggtcctgggcctggtcaccctggaggacgtgatcgaggagatcatcaggtccgagatcctggacgagtctgaagactaccgagacaccgtggtgaagaggaagcctgcttctctgatggcccctctgaagcggaaggaggagttctccttgttcaaggtgtctgatgatgaatataaagtaacaatctcgcctcagctgctcttggccacccagcgcttcctgtcccgagaagtggatgtattcagcccgctgcgcatctctgagaaggtcctgctgcacctgttgaagcatcccagtgtcaaccaggaagtgaggtttgacgagagcaaccggctggccacacaccactacctgtaccagcgcagccagccggtggattacttcattctcatcctgcagggcagggttgaagtggagatcgggaaagagggtctgaagtttgagaatggggccttcacgtactatggagtgtcggccctaactgtgccatcctcggttcaccagtccccggtgtcctcgctccagcccatccgccatgacctgcagcccgacccaggtgacggcacgcattcatctgcgtattgtcccgactacaccgtgagggcgctctctgatctgcagctcatcaaggttacgcgactgcagtacctcaatgcactcctggctacccgagcccagaacctgccacagtcccctgagaacaccgacctgcaggttattccaggcagccagaccaggctccttggtgagaagaccaccacagcggcagggtccagccacagcaggcccggcgtcccggtggaaggcagccctgggcggaacccaggcgtttaa

SEQ ID NO: 11 - DNA, 1167 bp, Homo sapiens;
atgcagcgattgctctttccgccgttgagggccttgaaggggaggcagtatctgccgctcctggctcctagggcagcgcctagagcacagtgtgattgcatcaggcgccctttgaggccagggcaatacagcaccatctctgaagtagctttgcaatctggaaggggtacagtgtcccttccctcaaaggctgctgagcgggtggtgggccgatggctcctggtctgcagtggaacagtggctggagcagttattcttggtggagtaactaggttgacagagtctggcctctcgatggtagattggcatttaataaaggagatgaagccacctacaagccaagaggaatgggaagcagaattccaaagataccagcaatttccagaatttaaaatcttgaatcatgatatgacactgacagaattcaagttcatctggtacatggagtactcacaccgaatgtggggtcgccttgtaggccttgtgtacatcctgcctgctgcctacttttggagaaagggctggctcagccgtggcatgaaaggacgtgttcttgccctctgtggcctcgtctgcttccagggtctgttgggatggtatatggtgaaaagtggactagaagaaaaatcagactcccatgacatccctcgggtcagtcagtaccgccttgctgcccacctgggatcagccctggttctttattgtgccagcttgtggacctcactgtcactgctactccctccgcacaagttgcctgaaacccaccaactcctacagttgagacgatttgctcatggaacagcaggtctggtgttccttacggccctctcaggggcttttgtggcagggctagatgctgggcttgtttataactcctttcccaaaatgggagaatcctggatcccggaggacctctttaccttctcccccatcctgaggaatgtttttgagaatcccaccatggtgcagtttgatcaccggattctgggaatcacttcagtcactgccattacagtgctctacttcctctctcggagaattccccttcctagaaggaccaagatggcagcagtgactctgctggctttggcgtatacacagggccctgtcttattcaactttacttttaaaatcagtgatttggatgaaggcatcagaaacatctga

SEQ ID NO: 12 - DNA, 6120 bp, Homo sapiens;
atgggggcctcttctccaagaagcccggagcctgtcgggccgccggcgcccggtctccccttctgctgcggaggatccctgctggcggttgtggtgctgcttgcgctgccggtggcctggggtcaatgcaatgccccagaatggcttccatttgccaggcctaccaacctaactgatgaatttgagtttcccattgggacatatctgaactatgaatgccgccctggttattccggaagaccgttttctatcatctgcctaaaaaactcagtctggactggtgctaaggacaggtgcagacgtaaatcatgtcgtaatcctccagatcctgtgaatggcatggtgcatgtgatcaaaggcatccagttcggatcccaaattaaatattcttgtactaaaggataccgactcattggttcctcgtctgccacatgcatcatctcaggtgatactgtcatttgggataatgaaacacctatttgtgacagaattccttgtgggctaccccccaccatcaccaatggagatttcattagcaccaacagagagaattttcactatggatcagtggtgacctaccgctgcaatcctggaagcggagggagaaaggtgtttgagcttgtgggtgagccctccatatactgcaccagcaatgacgatcaagtgggcatctggagcggccccgcccctcagtgcattatacctaacaaatgcacgcctccaaatgtggaaaatggaatattggtatctgacaacagaagcttattttccttaaatgaagttgtggagtttaggtgtcagcctggctttgtcatgaaaggaccccgccgtgtgaagtgccaggccctgaacaaatgggagccggagctaccaagctgctccagggtatgtcagccacctccagatgtcctgcatgctgagcgtacccaaagggacaaggacaacttttcacctgggcaggaagtgttctacagctgtgagcccggctacgacctcagaggggctgcgtctatgcgctgcacaccccagggagactggagccctgcagcccccacatgtgaagtgaaatcctgtgatgacttcatgggccaacttcttaatggccgtgtgctatttccagtaaatctccagcttggagcaaaagtggattttgtttgtgatgaaggatttcaattaaaaggcagctctgctagttactgtgtcttggctggaatggaaagcctttggaatagcagtgttccagtgtgtgaacaaatcttttgtccaagtcctccagttattcctaatgggagacacacaggaaaacctctggaagtctttccctttgggaaaacagtaaattacacatgcgacccccacccagacagagggacgagcttcgacctcattggagagagcaccatccgctgcacaagtgaccctcaagggaatggggtttggagcagccctgcccctcgctgtggaattctgggtcactgtcaagccccagatcattttctgtttgccaagttgaaaacccaaaccaatgcatctgactttcccattgggacatctttaaagtacgaatgccgtcctgagtactacgggaggccattctctatcacatgtctagataacctggtctggtcaagtcccaaagatgtctgtaaacgtaaatcatgtaaaactcctccagatccagtgaatggcatggtgcatgtgatcacagacatccaggttggatccagaatcaactattcttgtactacagggcaccgactcattggtcactcatctgctgaatgtatcctctcgggcaatgctgcccattggagcacgaagccgccaatttgtcaacgaattccttgtgggctaccccccaccatcgccaatggagatttcattagcaccaacagagagaattttcactatggatcagtggtgacctaccgctgcaatcctggaagcggagggagaaaggtgtttgagcttgtgggtgagccctccatatactgcaccagcaatgacgatcaagtgggcatctggagcggcccggcccctcagtgcattatacctaacaaatgcacgcctccaaatgtggaaaatggaatattggtatctgacaacagaagcttattttccttaaatgaagttgtggagtttaggtgtcagcctggctttgtcatgaaaggaccccgccgtgtgaagtgccaggccctgaacaaatgggagccggagctaccaagctgctccagggtatgtcagccacctccagatgtcctgcatgctgagcgtacccaaagggacaaggacaacttttcacccgggcaggaagtgttctacagctgtgagcccggctatgacctcagaggggctgcgtctatgcgctgcacaccccagggagactggagccctgcagcccccacatgtgaagtgaaatcctgtgatgacttcatgggccaacttcttaatggccgtgtgctatttccagtaaatctccagcttggagcaaaagtggattttgtttgtgatgaaggatttcaattaaaaggcagctctgctagttattgtgtcttggctggaatggaaagcctttggaatagcagtgttccagtgtgtgaacaaatcttttgtccaagtcctccagttattcctaatgggagacacacaggaaaacctctggaagtctttccctttggaaaagcagtaaattacacatgcgacccccacccagacagagggacgagcttcgacctcattggagagagcaccatccgctgcacaagtgaccctcaagggaatggggtttggagcagccctgcccctcgctgtggaattctgggtcactgtcaagccccagatcattttctgtttgccaagttgaaaacccaaaccaatgcatctgactttcccattgggacatctttaaagtacgaatgccgtcctgagtactacgggaggccattctctatcacatgtctagataacctggtctggtcaagtcccaaagatgtctgtaaacgtaaatcatgtaaaactcctccagatccagtgaatggcatggtgcatgtgatcacagacatccaggttggatccagaatcaactattcttgtactacagggcaccgactcattggtcactcatctgctgaatgtatcctctcaggcaatactgcccattggagcacgaagccgccaatttgtcaacgaattccttgtgggctacccccaaccatcgccaatggagatttcattagcaccaacagagagaattttcactatggatcagtggtgacctaccgctgcaatcttggaagcagagggagaaaggtgtttgagcttgtgggtgagccctccatatactgcaccagcaatgacgatcaagtgggcatctggagcggccccgcccctcagtgcattatacctaacaaatgcacgcctccaaatgtggaaaatggaatattggtatctgacaacagaagcttattttccttaaatgaagttgtggagtttaggtgtcagcctggctttgtcatgaaaggaccccgccgtgtgaagtgccaggccctgaacaaatgggagccagagttaccaagctgctccagggtgtgtcagccgcctccagaaatcctgcatggtgagcataccccaagccatcaggacaacttttcacctgggcaggaagtgttctacagctgtgagcctggctatgacctcagaggggctgcgtctctgcactgcacaccccagggagactggagccctgaagccccgagatgtgcagtgaaatcctgtgatgacttcttgggtcaactccctcatggccgtgtgctatttccacttaatctccagcttggggcaaaggtgtcctttgtctgtgatgaagggtttcgcttaaagggcagttccgttagtcattgtgtcttggttggaatgagaagcctttggaataacagtgttcctgtgtgtgaacatatcttttgtccaaatcctccagctatccttaatgggagacacacaggaactccctctggagatattccctatggaaaagaaatatcttacacatgtgacccccacccagacagagggatgaccttcaacctcattggggagagcaccatccgctgcacaagtgaccctcatgggaatggggtttggagcagccctgcccctcgctgtgaactttctgttcgtgctggtcactgtaaaaccccagagcagtttccatttgccagtcctacgatcccaattaatgactttgagtttccagtcgggacatctttgaattatgaatgccgtcctgggtattttgggaaaatgttctctatctcctgcctagaaaacttggtctggtcaagtgttgaagacaactgtagacgaaaatcatgtggacctccaccagaacccttcaatggaatggtgcatataaacacagatacacagtttggatcaacagttaattattcttgtaatgaagggtttcgactcattggttccccatctactacttgtctcgtctcaggcaataatgtcacatgggataagaaggcacctatttgtgagatcatatcttgtgagccacctccaaccatatccaatggagacttctacagcaacaatagaacatcttttcacaatggaacggtggtaacttaccagtgccacactggaccagatggagaacagctgtttgagcttgtgggagaacggtcaatatattgcaccagcaaagatgatcaagttggtgtttggagcagccctccccctcggtgtatttctactaataaatgcacagctccagaagttgaaaatgcaattagagtaccaggaaacaggagtttctttaccctcactgagatcatcagatttagatgtcagcccgggtttgtcatggtagggtcccacactgtgcagtgccagaccaatggcagatgggggcccaagctgccacactgctccagggtgtgtcagccgcctccagaaatcctgcatggtgagcataccctaagccatcaggacaacttttcacctgggcaggaagtgttctacagctgtgagcccagctatgacctcagaggggctgcgtctctgcactgcacgccccagggagactggagccctgaagcccctagatgtacagtgaaatcctgtgatgacttcctgggccaactccctcatggccgtgtgctacttccacttaatctccagcttggggcaaaggtgtcctttgtttgcgatgaagggttccgattaaaaggcaggtctgctagtcattgtgtcttggctggaatgaaagccctttggaatagcagtgttccagtgtgtgaacaaatcttttgtccaaatcctccagctatccttaatgggagacacacaggaactccctttggagatattccctatggaaaagaaatatcttacgcatgcgacacccacccagacagagggatgaccttcaacctcattggggagagctccatccgctgcacaagtgaccctcaagggaatggggtttggagcagccctgcccctcgctgtgaactttctgttcctgctgcctgcccacatccacccaagatccaaaacgggcattacattggaggacacgtatctctatatcttcctgggatgacaatcagctacatttgtgaccccggctacctgttagtgggaaagggcttcattttctgtacagaccagggaatctggagccaattggatcattattgcaaagaagtaaattgtagcttcccactgtttatgaatggaatctcgaaggagttagaaatgaaaaaagtatatcactatggagattatgtgactttgaagtgtgaagatgggtatactctggaaggcagtccctggagccagtgccaggcggatgacagatgggaccctcctctggccaaatgtacctctcgtacacatgatgctctcatagttggcactttatctggtacgatcttctttattttactcatcattttcctctcttggataattctaaagcacagaaaaggcaataatgcacatgaaaaccctaaagaagtggctatccatttacattctcaaggaggcagcagcgttcatccccgaactctgcaaacaaatgaagaaaatagcagggtccttccttga

SEQ ID NO: 13 - DNA, 3597 bp, Homo sapiens;
atgcgctccttgagaaagaagagagagaagcccagaccagagcagtggaagggcctcccggggccccccagagcgccagagcctgaggatgtcgccgtcccgggcggcgtggacctcctcaccctgccgcagctgtgcttcccagggggtgtgtgcgtggccactgaacctaaggaggattgcgtccacttcctggtgctgaccgatgtctgcgggaataggacctatggcgtggtggcccagtactaccggcccctgcatgatgagtactgtttctacaatggcaaaacgcaccgggagtgtcctggctgcttcgtgcccttcgcggtgtgcgtggtctccaggtttccctattacaactccctcaaggactgcctttcctgtttattggctcttctgaagccctgtaaagattttgaagtggacagtcatataaaagatttcgctgcgaagctgtctttaatacccagcccgccacctggaccgctccatttggtatttaacatgaagtcgctccagattgtgttacctgcccgagcagaccccgaaagccccatcctggacctggaccttcacctgcccttgctgtgcttcaggcctgagaaggtgctacagatcctgacatgcatcctgacggaacagcggatcgtcttcttctcctcggactgggctctgctgacgctggtcactgagtgcttcatggcctacctgtatccgctgcagtggcagcaccccttcgtgcccatcctgtcggaccagatgctggatttcgtcatggcccccacgtccttcctgatgggctgccatctcgaccacttcgaagaagtcagcaaggaagccgacggtttagttctgataaatattgatcatgggagcatcacctactccaagtccacggacgataacgtggacattcctgatgtccccctcctggcagcccagacgtttattcagagggtgcagagcctccagctccaccatgagctgcacgccgcccacctcctctccagcacagacctgaaggagggccgagcccaccggcggtcctggcagcagaaactcaactgccagatacagcagaccaccctgcagctgctcgtgagcatcttcagggatgtaaagaatcatttaaactatgaacacagagtctttaatagtgaagaatttctcaaaaccagggctccaggggaccatcagttttataagcaggtcttagacacctacatgttccattcttttcttaaagcccggctcaataggaggatggacgcctttgctcagatggacctcgacacccagtcggaggaggacagaataaatggaatgcttctaagtccaaggagaccgaccgttgagaaaagagcctcccggaagtcctcgcacctgcatgtcacccacaggcgcatggtggtcagcatgcccaacctgcaggacattgccatgcctgagctggcacccaggaactcctcgctccggctgacggacaccgcaggctgtaggggcagcagcgcagttctgaatgtcacgccgaagtccccgtatacattcaagattcccgaaatccactttccgctggagagcaagtgcgtgcaggcataccatgcccactttgtctccatgctgagcgaggccatgtgctttctggcccccgataactctctgctcctggcccgctatttgtacctccgagggctcgtttatctgatgcagggacagctgctgaacgccctcttggacttccagaatctgtataaaacagacatacggatctttcccactgatttggtgaagaggacggtggaatccatgtctgcccctgagtgggagggggctgagcaggcgccggagctgatgaggctcatcagcgagatcctggacaagccgcacgaggcctcgaagctggacgaccacgtgaagaagttcaagctgcccaagaagcacatgcagctgggcgacttcatgaagcgggtccaggagtcagggatcgtgaaggacgccagcatcatacaccggctgttcgaggccttgactgtaggacaggagaaacaaatcgacccagaaacattcaaagatttctacaactgctggaaggagacggaagcagaagcccaggaggtcagtctgccgtggctggtgatggaacacctggataaaaacgagtgtgtgtgtaagttgtccagctccgtcaagacaaacctaggcgttggcaagatcgccatgacccagaagcgcctgttcctcctaaccgaaggaaggccaggctacttggagatttccaccttcagaaatatagaggaggtcaggagaaccactactacatttctacttcggagaatacccactttaaaaatcagagtggcgtccaagaaagaagtcttcgaagccaacctgaaaaccgagtgtgacctttggcacctgatggtgaaggagatgtgggctgggaagaagctggccgatgaccacaaggaccctcactacgtccagcaggcgctgaccaacgtcttgctgatggacgccgtcgtgggcacactgcagtcaccaggcgccatctacgctgcctccaagttatcctactttgataagatgagtaacgaaatgcccatgacgcttccggagacaaccctggaaacactgaagcataaaatcaacccctcggcgggggaggcgttcccacaagcggtggacgtgctgctctacactccagggcatcttgacccagccgaaaaagttgaagatgctcaccccaagttatggtgtgctctgagcgaaggcaaggtgaccgtgttcaatgcttcttcatggaccatccaccagcactcctttaaagtgggcactgcaaaagtgaactgcatggtgatggccgaccagaaccaggtgtgggttggctcggaagactccgtcatctacatcatcaacgtccacagcatgtcctgcaacaagcagctcacagcccactgctccagtgtcacggatttgattgtgcaggacggacaggaggcacccagcaacgtgtactcgtgcagcatggacggcatggtgctggtgtggaatgtgagcacactgcaggtgaccagccgcttccagctgccgcgaggtggcctgacgtccatcagactgcacggcggccgcctgtggtgctgcacaggtaacagcatcatggtcatgaaaatgaatggatccctccatcaagaattgaagattgaggagaacttcaaagacaccagtacctccttcctggccttccagctccttcctgaggaggagcagctgtgggcggcctgtgcaggacgcagcgaggtttacatctggagcctgaaggacctggcccagcccccgcagagggtgcccctcgaggactgctctgagatcaactgcatgatccgggtgaagaagcaggtctgggtgggcagccgagggctggggcagggaacacccaaggggaaaatctacgtgattgacgccgagaggaagaccgtggagaaggagctggtggcgcacatggacaccgtgaggacgctgtgctcggctgaggacagatacgtgctgagtgggtcgggcagggaggaggggaaagtcgccatttggaaaggcgaataa

SEQ ID NO: 14 - DNA, 5613 bp, Homo sapiens;
atggcccgctggatcccgaccaagaggcagaagtacggggttgcgatctataactacaatgcttctcaagatgtggagctctccttgcagatcggtgacacagttcacatcctggagatgtacgagggttggtacagaggatataccctccaaaataaatctaaaaagggcattttccctgaaacatatatccatttgaaagaggcaactgtggaagacctggggcagcatgaaaccgtgattcctggcgagctccccctggtgcaggagctcacgtccactctgcgagaatgggctgtcatctggcgaaagctctacgtgaacaacaagctcaccctcttccgccagctgcagcagatgacgtacagcctgatcgagtggcggtcccagatcctgtctgggacgctccccaaggatgaactggcagagctcaagaagaaagtcacagccaaaattgatcatgggaacagaatgctggggttagatctggtggtgcgagatgacaatgggaacatcctagaccctgacgaaaccagcaccattgccctcttcaaggcccatgaggtggcctccaaaaggattgaggaaaagatccaagaagagaagtcaatcctgcagaacctcgatttgcggggccagtccatcttcagtaccatccacacctatggcctctatgtgaacttcaagaactttgtctgcaacatcggggaagatgcagagttgtttatggccctctacgacccagaccagtccacttttatcagtgagaactatctaattcgttggggcagtaacgggatgcccaaggaaatagagaagctcaataacctccaagcagtgtttacagaccttagcagcatggacctcatccggccccgcgtcagccttgtgtgccagattgtccgcgtgggccatatggagctgaaggaaggcaagaagcacacctgtggactccgaagaccttttggagtggcagtgatggatattactgatatcatacatgggaaggtggatgatgaagaaaagcagcattttattccctttcagcaaattgcgatggaaacctacatccgccagaggcagctcatcatgtcgcctttgataacatcacacgtgattggggagaatgagccactcacttcagtcttgaataaagtgattgcagcaaaggaagtgaatcacaaagggcaaggcctttgggtatccttgaagctcttgcccggtgacctcacccaggttcagaagaatttttcacacttggttgatagatcaacagcaatagcccggaagatgggctttcctgaaatcatactgccaggagatgttcggaatgacatttatgtcaccctgatccacggtgagtttgacaaagggaagaagaagacgccaaagaatgtggaggtgacgatgtctgtgcacgatgaggagggcaagctcttggagaaagcaattcaccctggtgctggatatgaaggcatttcagaatacaaatcagtagtctattaccaagtcaagcagccctgttggtatgagactgtcaaggtatccattgctatagaagaagtcacacgctgtcatataagatttaccttccgacacaggtcatctcaggaaaccagagataaatcggagcgagcatttggggtggccttcgtgaagctgatgaacccggatggcaccactctgcaggatgggaggcacgatctggtggtttataagggtgacaacaaaaaaatggaagatgctaaattctacctgaccctgcctggaaccaagatggagatggaagaaaaagagcttcaagcatccaaaaacctggtcaccttcaccccaagcaaggatagcactaaagacagctttcagattgccaccctcatctgctccacaaagctcacccagaatgttgacctgttaggcttgttaaattggcgttccaactcccagaacattaaacacaacctaaagaagttaatggaagtggatggaggagagattgttaagtttttgcaagatacactagatgcactctttaacataatgatggaaatgtcagacagtgaaacctatgacttccttgtgtttgacgcactggtatttattatttcactgataggagacatcaagttccagcattttaatcctgtacttgaaacctacatttacaagcacttcagcgccactttggcatatgtgaaactctccaaggtactgaacttctatgtggctaatgcagatgactccagcaagactgaactgctttttgctgcgttgaaagccttgaagtacttgtttagattcatcatccaatcccgagtgctctacttgagattttatgggcagagcaaagatggagatgagtttaataattcaattcgccagttatttcttgctttcaatatgctgatggacaggcctctggaggaagccgtcaagatcaagggggcagctttgaagtaccttcctagcataattaatgatgtcaaacttgtatttgatcctgttgagctcagcgtgctcttctgcaaattcattcaaagcattcctgacaaccagctggttcggcagaaacttaactgcatgaccaagatagtagagagcactctttttcgacagtcagagtgcagagaagtgctgctgccactgctgacagaccagctcagcggccagttagatgacaactccaacaagcctgaccacgaggcaagctcgcagcttctgagcaacatcctggaggtgctggacaggaaggatgtgggtgccactgcggtgcacattcagcttataatggaacggctgctgagaaggatcaaccggacagtgattgggatgaaccggcagtctccccacatcgggagttttgtggcttgcatgattgccctgctgcagcaaatggacgacagccactatagccactacatcagcactttcaaaaccagacaagacatcatcgacttcctcatggaaacttttatcatgttcaaggacctgattggaaagaatgtctatgccaaagattggatggtgatgaatatgactcaaaacagggtttttctccgtgctataaatcagtttgctgaagttctcacaagattcttcatggatcaggcaagctttgaacttcagctctggaacaattacttccatttggcagttgcatttctcacccatgagtcccttcagcttgaaaccttctcacaagccaagcgcaacaaaattgttaaaaaatatggggacatgagaaaggaaatcggctttagaatccgggacatgtggtataacctgggtccccacaaaatcaaattcatcccatccatggtgggtcccattctggaggtcactctgacccctgaagtagagctccggaaagccacaatccccattttctttgatatgatgcagtgtgagttcaatttcagtggaaatggcaatttccatatgtttgagaatgagctgatcacaaagctggaccaggaggtagaagggggcagaggagacgaacaatacaaggttcttctggaaaaactgctcctagaacattgccggaaacacaaatacctctccagctctggggaggtcttcgccctcctggtcagcagcctcttagagaacctgctggactatagaaccatcatcatgcaagatgagagcaaggagaaccgtatgagctgcactgtgaacgtgctgaacttttataaagaaaagaagagagaggacatatacataagatatctgtacaagcttcgagatttgcaccgagactgtgagaactacacagaagctgcctacacgcttctcttgcacgctgagcttctgcagtggtctgacaagccctgtgtgcctcatttgcttcagaaggacagttactatgtttatacccagcaagagcttaaagagaagctgtatcaagaaatcatatcatatttcgacaaaggcaaaatgtgggagaaggccatcaagctgagcaaagagttggctgagacttacgaaagcaaagtatttgactacgagggccttggcaacctcctgaaaaaaagggcctcattttatgagaacatcattaaggcaatgaggcctcagcctgaatactttgctgttggatactatggacagggctttccttctttcctacggaataaaatcttcatctatcggggaaaggagtatgagaggcgagaggacttcagcctgaggttgttaacccagttccccaatgcggagaagatgaccagtaccacgcctcctggggaagacatcaagtcgtcccccaagcagtacatgcagtgcttcactgtaaagccagtgatgagcttgccgcccagctacaaggataaacctgttccagagcagatcttaaactactacagagccaatgaagtgcagcagttcagatactcccggccgttccggaaaggagaaaaggatccagacaatgaatttgctacgatgtggattgaacggaccacgtatacgactgcatatacctttcctgggattctcaagtggtttgaagtcaaacagatttcaacagaagagatcagtcctctggagaatgccatcgaaaccatggagctgaccaacgagaggatcagcaactgtgttcagcagcatgcctgggaccggtccctctctgtgcaccctctctccatgctgctcagtggcatcgtggacccggccgtcatggggggcttctccaactatgaaaaggctttttttacagaaaagtacttgcaggagcatcctgaagaccaggagaaggttgagctgctaaagcgactaatagcattacagatgcccctgctaacagaagggatccgcatccatggggagaaactcacagagcagctgaagccgctgcatgagcggttgtcttcttgcttccgggaactcaaggagaaagtagaaaagcactatggggttataacactgccacccaacttgacggagaggaagcaaagccgcacggggtctattgtgctcccctacatcatgtcttccactctgcggaggttgtccatcacctcagtcacttcctctgtggtttccacctcttcaaactcgtctgacaatgctccttccagaccgggatctgatggctcaatcttggagccacttttggagcgcagggcctcgtcaggtgccagagttgaagatctgtcccttagagaggagaacagcgagaaccggatcagcaagtttaagagaaaagactggagtctgagcaagtcccaggtcattgcagagaaagcaccagaacccgatttgatgagcccaaccagaaaagcacaaaggccaaagagtctccagttgatggataatcggctatcaccatttcacggttcttcacctcctcagtcaacacccttgagcccacctccactcactcccaaagccaccaggaccctaagctccccatcgttgcagacagatggaatcgcggccactcctgtcccacctccacctccccccaaaagcaagccctatgaaggcagccagaggaactccactgagctcgctcccccactgcctgtccgaagagaagccaaagcaccaccccctccacctccaaaggctcggaagtctggcatccctacttccgagcctggatcccagtaa

SEQ ID NO: 15 - DNA, 1815 bp, Homo sapiens;
atggctaggatcagtttttcctacctctgcccagcctcctggtacttcactgtgcccacagtgagtccatttctccgtcagcgggtggcattcctgggactcttcttcatatcctgtctccttttacttatgttaatcatagactttcgacattggagtgcttcattaccacgagataggcaatacgaaaggtatttggctcgagtaggggagcttgaagctactgacactgaagacccaaatctgaattatggacttgttgttgactgtggcagcagtggttcccggatttttgtttatttctggccaagacataatgggaacccccatgacttgctggacatcaaacagatgagagaccgcaacagccaaccagtggttaaaaaaatcaagccaggaatctctgcaatggcagacactccagaacatgccagtgattaccttcgtcctctgctgagctttgctgctgctcatgtgcctgtgaagaagcacaaggagacccctctttacatcctctgcacagcaggcatgaggcttctccctgagaggaagcagttggctatcttggctgacctagtgaaagatttaccactggagtttgacttcctcttttcacagtctcaagcagaagtgatctctgggaagcaggaaggggtttatgcatggattggaatcaactttgttttgggaagattcgaccacgaggatgaatcagatgctgaggctacccaggaattggcagcaggacggagaaggacagtagggatactggatatgggaggagcctctctccaaattgcttatgaagttcctacctcaacctctgtccttcctgcaaagcaggaagaagctgccaagatcctgctggctgagttcaacctgggctgtgatgtgcaacacactgaacacgtgtacagggtttatgtcacaacttttctgggtttcggaggcaactttgcccggcagcgctacgaagaccttgttctgaatgaaactcttaacaaaaacagattgcttggtcagaagacaggtctgagtcccgacaatccatttctggatccctgcctgccagtgggactcacagatgtggtggagaggaacagccaagtcttacatgtccgaggaagaggagactgggtgtcttgtggggcaatgctgagccccctgctggctcgctccaacaccagccaggcctcactcaatggcatatatcaatcgcctattgacttcaacaacagcgagttctacggcttctctgagtttttttattgtacagaggatgtgttgcgcattggtggccgctaccatgggccaacatttgccaaggctgctcaggattactgtggcatggcttggtcggtactaactcagagattcaagaatggcctcttttcatcacatgcagatgagcatcgactcaaatatcagtgttttaaatcggcttggatgtaccaagtcttacatgaaggattccactttccctatgactacccaaacctgcggacagcccagctggtgtatgaccgagaggttcagtggacgctgggagccattctatataaaacacgattcttaccactcagggatcttcggcaggaaggtgtccgacaagcccatggtagctggttccgtctctcctttgtatacaaccactatctcttctttgcctgtatcctggtggtgctactggccatcttcctataccttctgcggctacgccgaattcaccaccgacaaacacgagcctcagctccattggacttgctgtggcttgaagaggtggtgcccatgatgggagtacaggtggggccgtga

SEQ ID NO: 16 - DNA, 2964 bp, Homo sapiens;
atggagctccgggtgctgctctgctgggcttcgttggccgcagctttggaagagaccctgctgaacacaaaattggaaactgctgatctgaagtgggtgacattccctcaggtggacgggcagtgggaggaactgagcggcctggatgaggaacagcacagcgtgcgcacctacgaagtgtgtgacgtgcagcgtgccccgggccaggcccactggcttcgcacaggttgggtcccacggcggggcgccgtccacgtgtacgccacgctgcgcttcaccatgctcgagtgcctgtccctgcctcgggctgggcgctcctgcaaggagaccttcaccgtcttctactatgagagcgatgcggacacggccacggccctcacgccagcctggatggagaacccctacatcaaggtggacacggtggccgcggagcatctcacccggaagcgccctggggccgaggccaccgggaaggtgaatgtcaagacgctgcgtctgggaccgctcagcaaggctggcttctacctggccttccaggaccagggtgcctgcatggccctgctatccctgcacctcttctacaaaaagtgcgcccagctgactgtgaacctgactcgattcccggagactgtgcctcgggagctggttgtgcccgtggccggtagctgcgtggtggatgccgtccccgcccctggccccagccccagcctctactgccgtgaggatggccagtgggccgaacagccggtcacgggctgcagctgtgctccggggttcgaggcagctgaggggaacaccaagtgccgagcctgtgcccagggcaccttcaagcccctgtcaggagaagggtcctgccagccatgcccagccaatagccactctaacaccattggatcagccgtctgccagtgccgcgtcgggtacttccgggcacgcacagacccccggggtgcaccctgcaccacccctccttcggctccgcggagcgtggtttcccgcctgaacggctcctccctgcacctggaatggagtgcccccctggagtctggtggccgagaggacctcacctacgccctccgctgccgggagtgccgacccggaggctcctgtgcgccctgcgggggagacctgacttttgaccccggcccccgggacctggtggagccctgggtggtggttcgagggctacgtcctgacttcacctatacctttgaggtcactgcattgaacggggtatcctccttagccacggggcccgtcccatttgagcctgtcaatgtcaccactgaccgagaggtacctcctgcagtgtctgacatccgggtgacgcggtcctcacccagcagcttgagcctggcctgggctgttccccgggcacccagtggggctgtgctggactacgaggtcaaataccatgagaagggcgccgagggtcccagcagcgtgcggttcctgaagacgtcagaaaaccgggcagagctgcgggggctgaagcggggagccagctacctggtgcaggtacgggcgcgctctgaggccggctacgggcccttcggccaggaacatcacagccagacccaactggatgagagcgagggctggcgggagcagctggccctgattgcgggcacggcagtcgtgggtgtggtcctggtcctggtggtcattgtggtcgcagttctctgcctcaggaagcagagcaatgggagagaagcagaatattcggacaaacacggacagtatctcatcggacatggtactaaggtctacatcgaccccttcacttatgaagaccctaatgaggctgtgagggaatttgcaaaagagatcgatgtctcctacgtcaagattgaagaggtgattggtgcaggtgagtttggcgaggtgtgccgggggcggctcaaggccccagggaagaaggagagctgtgtggcaatcaagaccctgaagggtggctacacggagcggcagcggcgtgagtttctgagcgaggcctccatcatgggccagttcgagcaccccaatatcatccgcctggagggcgtggtcaccaacagcatgcccgtcatgattctcacagagttcatggagaacggcgccctggactccttcctgcggctaaacgacggacagttcacagtcatccagctcgtgggcatgctgcggggcatcgcctcgggcatgcggtaccttgccgagatgagctacgtccaccgagacctggctgctcgcaacatcctagtcaacagcaacctcgtctgcaaagtgtctgactttggcctttcccgattcctggaggagaactcttccgatcccacctacacgagctccctgggaggaaagattcccatccgatggactgccccggaggccattgccttccggaagttcacttccgccagtgatgcctggagttacgggattgtgatgtgggaggtgatgtcatttggggagaggccgtactgggacatgagcaatcaggacgtgatcaatgccattgaacaggactaccggctgcccccgcccccagactgtcccacctccctccaccagctcatgctggactgttggcagaaagaccggaatgcccggccccgcttcccccaggtggtcagcgccctggacaagatgatccggaaccccgccagcctcaaaatcgtggcccgggagaatggcggggcctcacaccctctcctggaccagcggcagcctcactactcagcttttggctctgtgggcgagtggcttcgggccatcaaaatgggaagatacgaagaaagtttcgcagccgctggctttggctccttcgagctggtcagccagatctctgctgaggacctgctccgaatcggagtcactctggcgggacaccagaagaaaatcttggccagtgtccagcacatgaagtcccaggccaagccgggaaccccgggtgggacaggaggaccggccccgcagtactga

SEQ ID NO: 17 - DNA, 2760 bp, Homo sapiens;
atgacaggctataccatgctgcggaatgggggcgcggggaacggaggtcagacctgcatgctgcgctggtccaaccgcatccgcctcacgtggctcagcttcacgctctttgtcatcctggtcttcttcccgctcatcgcccactattacctcaccactctggatgaggctgatgaggcaggcaagcggatttttggtccccgggtggggaacgagctgtgcgaggtgaagcacgtgctggatctgtgccgcatccgggagtcggtgagtgaagagctcctgcagctggaggccaagcgccaagagctgaacagcgagatcgccaagctgaatctgaagatcgaagcctgtaagaagagcattgagaacgccaagcaggacctgctccagctcaagaatgtcatcagccagaccgagcattcctacaaggagctcatggcccagaaccagcccaagctgtccctgcccatccgactgctcccagagaaggacgatgccggcctccctcccccgaaggccactcggggctgccggctacacaactgctttgattattctcgttgccctctcacctctggcttcccggtctacgtctatgacagtgaccagtttgtctttggcagctacctggatcccttggtcaagcaggcttttcaggcgacagcacgagctaacgtttatgttacagaaaatgcagacatcgcctgcctttacgtgatactagtgggagagatgcaggagccggtggtgctgcggcctgctgagctggagaagcagttgtattccctgccacactggcggacggatggacacaaccatgtcatcatcaatctgtcacgtaagtcagatacacagaaccttctctataacgtcagtactggccgtgccatggtggcccagtccaccttctacactgtccagtacagacctggctttgacttggtcgtatcaccgctggtccatgccatgtctgagcccaacttcatggaaatcccaccacaggtgccggtgaagcggaaatatctcttcaccttccagggcgagaagattgagtctctgaggtctagccttcaggaggcccgctccttcgaagaggaaatggagggcgaccctcccgccgactacgatgaccggatcattgccaccctgaaggcggtgcaggacagcaagctggatcaggtcctggtggaattcacctgcaaaaaccagcccaaacccagcctgccgactgagtgggcactgtgtggagagcgggaggaccgcttggaattgctgaagctctccaccttcgccctcatcattacccccggggaccctcgcttggttatttcctctgggtgtgcaacacggctcttcgaagccctggaagtcggtgccgtcccggtggtgctgggggagcaggtccagcttccctaccaggacatgctgcagtggaacgaggcggccctggtggtgccaaagcctcgtgttaccgaggttcatttcctgctcagaagcctctccgatagtgacctcctggctatgaggcggcaaggccgctttctctgggagacttacttctccactgctgacagtatttttaataccgtgctggctatgattaggactcgcatccagatcccagccgctcccatccgggaagaggcggcagctgagatcccccaccgttcaggcaaggcggctggaactgaccccaacatggctgacaacggggacctggacctggggccagtggagacggagccgccctacgcctcacccagatacctccgcaatttcactctgactgtcactgacttttaccgcagctggaactgtgctccagggcctttccatcttttcccccacactccctttgaccctgtgttgccctcagaggccaaattcttgggctcagggactggctttcggcctattggtggtggagctgggggttctggcaaggaatttcaggcagcgcttggaggcaatgttccccgagagcagttcacggtggtgatgttgacttatgagcgggaggaagtgcttatgaactctttagagaggctgaatggcctcccttacctgaacaaggtcgtggtggtgtggaattctcccaagctgccatcagaggaccttctgtggcctgacattggcgtccccatcatggtggtccgtactgagaagaacagtttgaacaaccgattcttaccctggaatgaaattgagacagaggccatcctgtccattgatgacgatgctcacctccgccatgacgaaatcatgtttgggttccgggtgtggagagaagctcgggaccgcatcgtgggcttccctggccgttaccacgcatgggacatcccccatcagtcctggctctacaactccaactactcctgtgagctgtccatggtgctgacaggtgctgccttctttcacaagtattatgcctacctgtattcttatgtgatgccccaggccatccgggacatggtggatgaatacatcaactgtgaggacattgccatgaacttccttgtctcccacatcactcggaagccccccatcaaggtgacctcacggtggacattccgatgcccaggatgccctcaggccctgtctcatgatgactcccacttccacgagcggcacaagtgcatcaacttcttcgtgaaggtgtacggctacatgcccctcctgtacacgcagttcagggtggattctgtgctcttcaagacacgcctgccccatgacaagaccaagtgcttcaagttcatctag

SEQ ID NO: 18 - DNA, 2787 bp, Homo sapiens;
atgggcggctcagcctccagccagctggacgagggcaagtgcgcttacatccgagggaaaactgaggctgccatcaaaaacttcagtccctactacagtcgtcagtactctgtggctttctgcaatcacgtgcgcactgaagtagaacagcaaagagatttaacgtcacagtttttgaagaccaagccaccattggcgcctggaactattttgtatgaagcagagctatcacaattttctgaagacataaagaagtggaaggagagatacgttgtagttaaaaatgattatgctgtggagagctatgagaataaagaggcctatcagagaggagctgctcctaaatgtcgaattcttccagccggtggcaaggtgttaacctcagaagatgaatataatctgttgtctgacaggcatttcccagaccctcttgcctccagtgagaaggagaacactcagccctttgtggtcctgcccaaggaattcccagtgtacctgtggcagcccttcttcagacacggctacttctgcttccacgaggctgctgaccagaagaggtttagtgccctcctgagtgactgcgtcaggcatctcaatcatgattacatgaagcagatgacatttgaagcccaagcctttttagaagctgtgcaattcttccgacaggagaagggtcactatggttcctgggaaatgatcactggggatgaaatccagatcctgagtaacctggtgatggaggagctcctgcccactcttcagacagacctgctgcctaagatgaaggggaagaagaatgacagaaagaggacgtggcttggtctcctcgaggaggcctacaccctggttcagcatcaagtttcagaaggattaagtgccttgaaggaggaatgcagagctctgacaaagggcctggaaggaacgatccgttctgacatggatcagattgtgaactcaaagaactatttaattggaaagatcaaagcgatggtggcccagccggcggagaaaagctgcttggagagtgtgcagccattcctggcatccatcctggaggagctcatgggaccagtgagctcgggattcagtgaagtacgtgtactctttgagaaagaggtgaatgaagtcagccagaacttccagaccaccaaagacagtgtccagctaaaggagcatctagaccggcttatgaatcttccgctgcattccgtgaagatggaaccttgttatactaaagtcaacctgcttcacgagcgcctgcaggatctcaagagccgcttcagattcccccacattgatctggtggttcagaggacacagaactacatgcaggagctaatggagaatgcagtgttcacttttgagcagttgctttccccacatctccaaggagaggcctccaaaactgcagttgccattgagaaggttaaactccgagtcttaaagcaatatgattatgacagcagcaccatccgaaagaagatatttcaagaggcactagttcaaatcacacttcccactgtgcagaaggcactggcgtccacatgcaaaccagagcttcagaaatacgagcagttcatctttgcagatcataccaatatgattcacgttgaaaatgtctatgaggagattttacatcagatcctgcttgatgaaactctgaaagtgataaaggaagctgctatcttgaagaaacacaacttatttgaagataacatggccttgcccagtgaaagtgtgtccagcttaacagatctaaagccccccacagggtcaaaccaggccagccctgccaggagagcttctgccattctgccaggagttctgggtagtgagaccctcagtaacgaagtattccaggagtcagaggaagagaagcagcctgaggtccctagctcgttggccaaaggagaaagcctttctctccctgggccaagcccacccccagatgggactgagcaggtgattatttcaagagtggatgaccccgtggtgaatcctgtggcaacagaggacacagcaggactcccgggcacatgctcatcagagctggagtttggagggacccttgaggatgaagaacccgcccaggaagagccagaacccatcactgcctcgggttctttgaaggcgctcagaaagttgctgacagcgtccgtggaagtaccagtggactctgctccagtgatggaagaagatacgaatggggagagccacgttccccaagaaaatgaagaagaagaggaaaaagagcccagtcaggcagctgccatccaccccgacaactgtgaagaaagtgaagtcagcgagagggaggcccaacctccctgtcccgaggcccatggggaggagttggggggatttccagaggtaggcagcccagcctctccgccagccagtggagggctcaccgaggagcccctggggcccatggagggggagctcccaggagaggcctgcacactcactgcccatgaaggaagagggggcaagtgtaccgaggaaggggatgcctcacagcaagagggctgcaccttaggttctgaccccatctgcctcagtgagagccaggtttctgaggaacaagaagagatgggagggcaaagcagcgcggcccaggccacggccagtgtgaatgcagaggagatcaaggtagcccgtattcatgagtgtcagtgggtggtggaggatgctccaaacccggatgtcctgctgtcacacaaagatgacgtgaaggagggagaaggtggtcaggagagtttcccagagctgccctcagaggagtga

SEQ ID NO: 19 - DNA, 1107 bp, Homo sapiens;
atggcggcagcggcggaggagcggatggcagaggaaggaggcggcggccaaggcgacggcggttcctctttggcctccggctctacccagcgacagcctccaccgcccgcgccacagcacccgcagccggggtcccaggcgctcccagcccccgcgctggctccggaccagctgcctcaaaacaacacgcttgtggcgctgcccatcgtagccatcgagaacatcctcagctttatgtcctacgacgaaattagccagctccgcctggtttgtaaaagaatggacttggtctgccagagaatgttgaatcagggatttctgaaagtggagaggtaccataatctatgtcagaaacaagttaaagcacaactcccaaggagagagtcagaaaggagaaaccattcattagctcgtcatgcagacattcttgctgctgttgaaacaaggctgtcactattaaatatgactttcatgaaatatgtggattccaatctctgttgcttcatcccaggaaaggtgattgatgagatttatcgtgtgttgagatatgtcaattctaccagagcccctcaacgagctcatgaagtacttcaagaattaagggatatatcctctatggcaatggagtactttgatgaaaagattgttccaattttaaagaggaaattaccaggatcagatgtttctggaagactcatgggctctcctccagttccaggaccgtctgcagccctaacaacaatgcagctcttctccaagcaaaatccttcaagacaagaggttaccaaactccagcagcaggttaaaacaaatggtgctggcgtgactgttctcaggcgtgaaatttctgagcttcgcaccaaagtgcaagaacagcaaaaacagcttcaagaccaggaccagaaactgctagagcagacccagatcataggtgaacaaaatgcacggttggcagagctagaacgcaaactacgagaagtaatggaaagtgctgtaggaaattcctcagggtccgggcagaatgaggagtctcctcggaaacgaaaaaaggccacggaagccatagactctcttaggaaatctaaacgtcttcggaatagaaagtaa

SEQ ID NO: 20 - DNA, 2724 bp, Homo sapiens;
atgcccacggccgccgcccccatcatcagctcggtccagaagctggttctgtatgagactagagctagatactttctagttgggagcaataatgcagaaacgaaatatcgtgtcttgaagattgatagaacagaaccaaaagatttggtcataattgatgacaggcatgtctatactcaacaagaagtaagggaacttcttggccgcttggatcttggaaatagaacaaagatgggacagaaaggatcctcgggcttatttcgagcggtttcagcttttggtgttgtgggttttgtcaggttcttagaaggctattatattgtgttaataactaaaaggaggaagatggcggatattggaggtcatgcaatctataaggtcgaagatacaaatatgatctatatacccaatgattctgtacgggttactcatcctgatgaagctaggtatctacgaatatttcaaaatgtggacctatctagcaatttttactttagttacagctatgatttgtcccactcacttcaatataatctcactgtcttgcgaatgcccctggagatgttaaagtcagaaatgacccagaatcgccaagagagctttgacatctttgaagatgaaggattaattacacaaggtggaagcggggtatttgggatctgtagtgagccttatatgaaatatgtatggaatggtgaacttctggatataattaaaagtactgtgcatcgtgactggcttttgtatattattcatgggttctgtgggcagtcaaagctgttgatctatggacgaccagtgtatgtcactctaatagctagaagatccagtaaatttgctggcacccgttttcttaaaagaggtgcaaactgtgagggtgatgttgcaaatgaagtggagactgaacaaatactctgcgatgcttctgtgatgtctttcactgcaggaagttattcttcatatgtacaagttagaggatctgtgcccttatactggtctcaggacatttcaactatgatgcctaaaccacctattacattggatcaggcagatccatttgcacatgtggctgcccttcactttgaccagatgttccagaggtttggctctcccatcatcatcttgaatttagtgaaggaacgagagaaaagaaagcatgaaagaattctgagtgaagaacttgttgctgctgtgacctatctcaaccaatttttgcctcctgagcacactattgtttatattccctgggacatggccaagtataccaaaagcaagctgtgtaatgttcttgatcgactaaatgtgattgcagaaagtgtggtgaagaaaacaggtttctttgtaaaccgccctgattcttactgtagcattttgcggccagatgaaaagtggaatgaactaggaggatgtgtgattcccactggtcgcctgcagactggcatccttcgaaccaactgtgtggactgtttagatcgcaccaacacagcacagtttatggtgggaaaatgtgctctggcctatcagctgtattcactgggactgattgacaaacctaatctacagtttgatacagatgcagttaggttatttgaggaactctatgaagatcatggtgataccctatcccttcagtatggtggttctcaacttgttcatcgtgtgaaaacctacagaaagatagcaccatggacccagcactccaaagacatcatgcaaaccctgtctagatattacagcaatgctttttcagatgccgatagacaagattccattaatctcttcctgggagttttccatcccactgaagggaaacctcatctctgggagctcccaacagatttttatttgcatcacaaaaataccatgagacttttgccaacaagaagaagttatacttactggtggacaccagaggtgataaagcatttaccattgccctatgatgaagttatctgtgctgtgaacttaaagaagttgatagtgaagaaattccacaaatatgaagaagagattgatatccacaatgagttctttcggccatatgagttgagcagctttgatgataccttttgcttggctatgacaagctcagcacgtgactttatgcctaagaccgttggaattgatccaagtccatttactgtgcgtaaaccagatgaaactggaaaatcagtattgggaaacaaaagcaatagagaagaagctgtattacagcggaaaacggcagccagcgccccgccgccccccagcgaggaggctgtgtccagcagctctgaggatgactctgggactgatcgggaagaagagggctctgtgtctcagcgctccactcccgtgaagatgactgatgcaggagacagtgccaaagtgaccgagaatgtggtccaacccatgaaggagctatatggaattaacctctcagatggcctctcagaagaagatttctccatttattcaagatttgttcagctggggcagagtcaacataaacaagacaagaatagccagcagccctgttctaggtgctcagatggagttataaaactaacacccatctcggctttctcgcaagataacatctatgaagttcagcccccaagagtagacagaaaatctacagagatcttccaagcccacatccaggccagccaaggtatcatgcagcccctaggaaaagaggactcctccatgtaccgagagtacatcaggaaccgctacctgtga

SEQ ID NO: 21 - DNA, 1869 bp, Homo sapiens;
atgggtttgtatggacaggcttgtccatctgtaacttcattaaggatgacatctgaactggagagcagcctaacgtctatggactggttaccacagctcaccatgagagcagccatccaaaaatctgatgctacacaaaatgcacatggaacaggaatttctaagaagaatgcactccttgacccaaatacaactctggaccaggaagaagtccaacagcacaaagatgggaaacctccatacagttatgccagcctcattacatttgcaattaatagctcacccaaaaagaaaatgactttaagtgaaatttatcagtggatttgtgataacttcccatattatagagaggctggcagtggttggaagaattccatacgacataatctgtcattgaacaaatgtttccttaaagtgcctcgatctaaggatgaccctggaaaggggtcctactgggcaatagacaccaatccgaaggaagatgtgctgcctactcggccaaagaagagggcacgatctgtagaacgggcctcaactccatatagcatagattcagattctttgggaatggagtgtattatttcgggaagtgcctctccaactctggcaatcaacactgtgactaacaaagtaacattgtataacactgatcaggatggtagtgatagcccacgcagtagccttaacaacagtctctcagaccagagtttggcatctgttaatttgaacagtgttggaagtgtgcatagttatacaccggtgacaagccatccagaatcagtctctcaatcattaactcctcagcagcaaccacagtacaaccttccagaaagagacaagcaactacttttctcagaatataattttgaagatcttagtgcctcatttcggagcctttataagtcagtttttgagcagtcacttagtcaacaaggtttgatgaacatcccttctgaatcttcccagcagtcccacacttcatgtacctatcagcactctcccagcagtacagtgagcactcacccacacagcaaccaaagcagcctgtccaacagtcatggcagtggcctcaacaccacaggcagtaattcggttgcacaggtctcactgtctcacccccagatgcacacacagccatctccacatcctccccatcgaccgcatggtttaccgcagcatccgcagcgttccccacacccagcaccacacccacagcaacacagccagctccagtcccctcacccccagcatccctctccacatcaacacatacagcaccatccgaaccatcagcatcagacgttaacacatcaggcacccccacccccacaacaggtatcctgtaattctggtgtttcaaatgattggtatgcgacacttgatatgctaaaagaaagctgtcgaattgccagcagtgttaattggtcagatgtagacctttcacagtttcaaggtctgatggagagtatgagacaggcagatctcaagaactggtctttagaccaggttcagtttgccgatctttgttcttctcttaatcagttctttacacaaactggccttatacattcacagagtaatgttcaacaaaatgtttgtcatggtgccatgcatccaacaaaaccttcccaacacattggaacaggaaatttgtacatagattctaggcaaaatctccctccttcagtgatgccaccccctggttatcctcatatcccacaggcactcagcactccaggaacaacgatggcaggccatcacagagccatgaaccagcagcacatgatgccttcccaagccttccagatgcggcgttccctgcctccagatgacatccaggatgactttgattgggattcaattgtgtag

SEQ ID NO: 22 - DNA, 1917 bp, Homo sapiens;
atgagcggtgacccagatgttctggaatactacaagaacgatcactccaagaagcctctgcggatcatcaacctgaacttctgtgagcaggtagatgcaggcctgacctttaacaagaaggagctgcaggatagttttgtgtttgacatcaagaccagtgaacgcaccttttacctggtggctgagacagaagaggacatgaataagtgggtccagagcatctgccagatctgtggcttcaatcaggctgaggagagcacagactccctgagaaatgtttcctcagccggtcatggcccccgctcttctccagctgagctcagcagctctagccagcaccttctccgagagcgcaagtcctcagccccatcacactccagccagccaactctgttcacgtttgaaccccctgtgtcaaaccacatgcagcccaccttgtccaccagcgcacctcaggagtatctctacttgcaccagtgcataagccgaagagcagaaaatgcaaggagtgccagcttctctcagggcaccagagcctcttttctcatgaggagtgacacagctgtacaaaaacttgcccagggcaatggacactgtgtcaacgggatcagtggtcaagtccatggcttctatagccttcccaagccgagccggcacaatacagaattcagagacagtacctacgacctcccccgcagcctggcctcccatggccacaccaagggcagcctcacaggctccgagacagataatgaggatgtgtacaccttcaagacgcccagcaacaccctgtgcagggagttcggggacctcctggtagacaatatggatgttccggccaccccactctcagcctaccagatccctaggacattcactctggacaaaaaccacaatgccatgacagtggccactcctggggactcagccatagctcccccaccccgcccccccaagccaagtcaggcagaaacacctcgatggggcagtcctcagcagagaccgccaatcagtgaaaatagcagatctgtcgctgccaccatccccagacgcaacaccctccctgcaatggacaacagccgacttcaccgagcttcttcctgtgagacctacgagtacccacagcgtggtggagagagtgcaggccggtctgctgaatccatgagtgatggagttggctctttcctgccagggaaaatgattgtgggccgatcggacagcaccaattctgaagacaactatgtgcccatgaatccaggttcttccaccctgttggccatggaacgagcaggtgataattcccagagcgtctacatcccaatgagcccaggggcccatcactttgactcacttggctacccatcaacaacccttcctgtgcaccgaggccccagcagaggaagtgagattcagccaccccctgtcaaccgcaacctcaaacctgatcggaaagcaaagccaacaccacttgacctgaggaacaacaccgtcatcgatgaactccccttcaagtcacctatcaccaagtcttggtctagggccaaccacaccttcaactccagctcctcccagtactgccgccccatctccacccagagcatcaccagcacagactcaggagacagcgaagagaactatgtccctatgcaaaacccagtgtctgcatctcccgttcccagtggcacgaacagtcctgcccctaagaagagcaccggcagcgttgattatctggccctggacttccagccgagctccccaagcccccaccgcaagccatctacttcatccgtcacctctgatgagaaggtggactacgttcaggtggacaaggagaagacccaggccctgcagaacaccatgcaggagtggacagacgtgcggcagtcctcagagccttccaagggtgccaagctgtga

SEQ ID NO: 23 - DNA, 1716 bp, Homo sapiens;
atgcggcggcgctcgcggatgctgctctgcttcgccttcctgtgggtgctgggcatcgcctactacatgtactcggggggcggctctgcgctggccgggggcgcgggcggcggcgccggcaggaaggaggactggaatgaaattgaccccattaaaaagaaagaccttcatcacagcaatggagaagagaaagcacaaagcatggagaccctccctccagggaaagtacggtggccagactttaaccaggaagcttatgttggagggacgatggtccgctccgggcaggacccttacgcccgcaacaagttcaaccaggtggagagtgataagcttcgaatggacagagccatccctgacacccggcatgaccagtgtcagcggaagcagtggcgggtggatctgccggccaccagcgtggtgatcacgtttcacaatgaagccaggtcggccctactcaggaccgtggtcagcgtgcttaagaaaagcccgccccatctcataaaagaaatcatcttggtggatgactacagcaatgatcctgaggacggggctctcttggggaaaattgagaaagtgcgagttcttagaaatgatcgacgagaaggcctcatgcgctcacgggttcggggggccgatgctgcccaagccaaggtcctgaccttcctggacagtcactgcgagtgtaatgagcactggctggagcccctcctggaaagggtggcggaggacaggactcgggttgtgtcacccatcatcgatgtcattaatatggacaactttcagtatgtgggggcatctgctgacttgaagggcggttttgattggaacttggtattcaagtgggattacatgacgcctgagcagagaaggtcccggcaggggaacccagtcgcccctataaaaacccccatgattgctggtgggctgtttgtgatggataagttctattttgaagaactggggaagtacgacatgatgatggatgtgtggggaggagagaacctagagatctcgttccgcgtgtggcagtgtggtggcagcctggagatcatcccgtgcagccgtgtgggacacgtgttccggaagcagcacccctacacgttcccgggtggcagtggcactgtctttgcccgaaacacccgccgggcagcagaggtctggatggatgaatacaaaaatttctattatgcagcagtgccttctgctagaaacgttccttatggaaatattcagagcagattggagcttaggaagaaactcagctgcaagcctttcaaatggtaccttgaaaatgtctatccagagttaagggttccagaccatcaggatatagcttttggggccttgcagcagggaactaactgcctcgacactttgggacactttgctgatggtgtggttggagtttatgaatgtcacaatgctgggggaaaccaggaatgggccttgacgaaggagaagtcggtgaagcacatggatttgtgccttactgtggtggaccgggcaccgggctctcttataaagctgcagggctgccgagaaaatgacagcagacagaaatgggaacagatcgagggcaactccaagctgaggcacgtgggcagcaacctgtgcctggacagtcgcacggccaagagcgggggcctaagcgtggaggtgtgtggcccggccctttcgcagcagtggaagttcacgctcaacctgcagcagtag

SEQ ID NO: 24 - DNA, 1011 bp, Homo sapiens;
atgtccaatatggagaacagctttgacgatgtttcttgcctctctccccagaacctgggatcctcatcgccaagcaaaaagcagagcaaggaaaacaccatcacaataaactgtgtgacgttccctcacccagacacgatgccggaacagcagctgctgaaaccaaccgagtggagctactgcgactacttctgggctgataagaaggacccccaaggcaacggcaccgtggctgggtttgaactactgctccagaaacagctgaagggcaaacaaatgcagaaggaaatgtcagaattcatccgggaaaggataaagattgaagaagactatgcgaagaacttagctaagctctctcagaactccttggcttcacaggaggaaggctccttgggagaggcgtgggcccaggtgaagaagagcctggcggacgaagcagaagttcacctcaagttctctgccaagcttcacagcgaggtggagaagcccctgatgaacttccgtgagaacttcaagaaagacatgaagaagtgcgaccaccacattgccgaccttcgcaagcagctcgccagccgctatgcctcggtggagaaggcccggaaagccctcacagagcggcagagagacctggagatgaagacccagcagctggagatcaagctgagcaacaagacagaggaggacatcaagaaggcgcggagaaagtccacacaggctggagacgacctcatgcgctgtgtggatctctacaaccaggcccagtccaaatggtttgaagagatggtgaccaccacattggagctagagcggctggaggtggagagggtagagatgatccggcagcacctgtgccagtacacgcagctgcggcatgaaacagacatgttcaaccaaagcacagtcgagcccgtggatcagctgcttcgaaaagtggacccggccaaagacagggagctgtgggtcagagagcacaagacgggcaacatccgccctgtggacatggagatctag

SEQ ID NO: 25 - DNA, 5055 bp, Homo sapiens;
atggaggatcttgttcaagatggggtggcttcaccagctacccctgggaccgggaaatctaagctggaaacattgcccaaagaagacctcatcaagtttgccaagaaacagatgatgctaatacagaaagctaaatcaaggtgtacagaattggagaaagaaattgaagaactcagatcaaaacctgttactgaaggaactggtgatattattaaggcattaactgaacgtctggatgctcttcttctggaaaaagcagagactgagcaacagtgtctttctctgaaaaaggaaaatataaaaatgaagcaagaggttgaggattctgtaacaaagatgggagatgcacataaggagttggaacaatcacatataaactatgtgaaagaaattgaaaatttgaaaaatgagttgatggcagtacgttccaaatacagtgaagacaaagctaacttacaaaagcagctggaagaagcaatgaatacgcaattagaactttcagaacaacttaaatttcagaacaactctgaagataatgttaaaaaactacaagaagagattgagaaaattaggccaggctttgaggagcaaattttatatctgcaaaagcaattagacgctaccactgatgaaaagaaggaaacagttactcaactccaaaatatcattgaggctaattctcagcattaccaaaaaaatattaatagtttgcaggaagagcttttacagttgaaagctatacaccaagaagaggtgaaagagttgatgtgccagattgaagcatcagctaaggaacatgaagcagagataaataagttgaacgagctaaaagagaacttagtaaaacaatgtgaggcaagtgaaaagaacatccagaagaaatatgaatgtgagttagaaaatttaaggaaagccacctcaaatgcaaaccaagacaatcagatatgttctattctcttgcaagaaaatacatttgtagaacaagtagtaaatgaaaaagtcaaacacttagaagataccttaaaagaacttgaatctcaacacagtatcttaaaagatgaggtaacttatatgaataatcttaagttaaaacttgaaatggatgctcaacatataaaggatgagttttttcatgaacgggaagacttagagtttaaaattaatgaattattactagctaaagaagaacagggctgtgtaattgaaaaattaaaatctgagctagcaggtttaaataaacagttttgctatactgtagaacagcataacagagaagtacagagtcttaaggaacaacatcaaaaagaaatatcagaactaaatgagacatttttgtcagattcagaaaaagaaaaattaacattaatgtttgaaatacagggtcttaaggaacagtgtgaaaacctacagcaagaaaagcaagaagcaattttaaattatgagagtttacgagagattatggaaattttacaaacagaactgggggaatctgctggaaaaataagtcaagagttcgaatcaatgaagcaacagcaagcatctgatgttcatgaactgcagcagaagctcagaactgcttttactgaaaaagatgcccttctcgaaactgtgaatcgcctccagggagaaaatgaaaagttactatctcaacaagaattggtaccagaacttgaaaataccataaagaaccttcaagaaaagaatggagtatacttacttagtctcagtcaaagagataccatgttaaaagaattagaaggaaagataaattctcttactgaggaaaaagatgattttataaataaactgaaaaattcccatgaagaaatggataatttccataagaaatgtgaaagggaagaaagattgattcttgaacttgggaagaaagtagagcaaacaatccagtacaacagtgaactagaacaaaaggtaaatgaattaacaggaggactagaggagactttaaaagaaaaggatcaaaatgaccaaaaactagaaaaacttatggttcaaatgaaagttctctctgaagacaaagaagtattgtcagctgaagtgaagtctctttatgaggaaaacaataaactcagttcagaaaaaaaacagttgagtagggatttggaggtttttttgtctcaaaaagaagatgttatccttaaagaacatattactcaattagaaaagaaacttcagttaatggttgaagagcaagataatttaaataaactgcttgaaaatgagcaagttcagaagttatttgttaaaactcagttgtatggttttcttaaagaaatgggatcagaagtttcagaagacagtgaagagaaagatgttgttaatgtcctacaggcagtcggtgaatccttggcaaaaataaatgaggaaaaatgcaacctggcttttcagcgtgatgaaaaagtattagagttagaaaaagagattaagtgccttcaagaagagagtgtagttcagtgtgaagaacttaagtctttattgagagactatgagcaagagaaagttctcttaaggaaagagttagaagaaatacagtcagaaaaagaggccctgcagtctgatcttctagaaatgaagaatgctaatgaaaaaacaaggcttgaaaatcagaatcttttaattcaagttgaagaagtatctcaaacatgtagcaaaagtgaaatccataatgaaaaagaaaaatgttttataaaggaacatgaaaacctaaagccactactagaacaaaaagaattacgagataggagagcagagttgatactattaaaggattccttagcaaaatcaccttctgtaaaaaatgatcctctgtcttcagtaaaagagttggaagaaaaaatagaaaatctggaaaaagaatgcaaagaaaaggaggagaaaataaataagataaaattagttgccgtaaaggcaaagaaagaactagattccagcagaaaagagacccagactgtgaaggaagaacttgaatctcttcgatcagaaaaggaccagttatctgcttccatgagagatctcattcaaggagcagaaagctataagaatcttttattagaatatgaaaagcagtcagagcaactggatgtggaaaaagaacgtgctaataattttgagcatcgtattgaagaccttacaagacaattaagaaattcgactttgcagtgtgaaacaataaattctgataatgaagatctcctggctcgtattgagacattacagtctaatgccaaattattagaagtacagattttagaagtccagagagccaaagcaatggtagacaaagaattagaagctgaaaaacttcagaaagaacagaagataaaggaacatgccactactgtaaatgaacttgaagaacttcaggtacaacttcaaaagcaaaagaaacagcttcagaaaaccatgcaagaattagagctggttaaaaaggatgcccaacaaaccacattgatgaatatggaaatagctgattatgaacgtttgatgaaagaactaaatcaaaagttaactaataaaaacaacaagatagaagatttggagcaagaaataaaaattcaaaaacagaaacaagaaaccctacaagaagaaataacttcattacagtcttcagtacaacaatatgaagaaaaaaacaccaaaatcaagcaattgcttgtgaaaaccaaaaaggaactggcagattcaaagcaagcagaaactgatcacttaatacttcaagcatctttaaaaggtgagctggaggcaagccagcagcaagtagaagtctataaaatacagctggctgaaataacatcagagaagcacaaaatccacgagcacctgaaaacctctgcggaacagcaccagcgtacgctaagtgcataccagcagagagtgacagcactacaggaagagtgccgtgctgccaaggcagaacaagctactgtaacctctgaattcgagagctacaaagtccgagttcataatgttctaaaacaacagaaaaataaatctatgtctcaggctgaaactgagggcgctaaacaagaaagggaacatctggaaatgctgattgaccagctaaaaatcaaattacaagatagccaaaataacttacagattaatgtatctgaacttcaaacattgcagtctgaacatgatacactgctagaaaggcacaacaagatgctgcaggaaactgtgtccaaagaggcggaactccgggaaaaattgtgttcaatacagtcagagaacatgatgatgaaatctgaacatacacagactgtgagtcagctaacatcccagaacgaggtccttcgaaatagcttccgagatcaagtgcgacatttgcaggaagaacacagaaagacagtggagacattacagcagcagctctccaagatggaagcacagctcttccagcttaagaatgaaccgaccacaagaagcccagtttcctctcaacaatctttgaagaaccttcgagaaaggagaaacacagacctcccgcttctagacatgcacactgtaacccgggaagagggagaaggcatggagacaactgatacggagtctgtgtcttccgccagcacatacacacagtctttagagcagctgcttaactctcccgaaactaaacttgagcctccattatggcatgctgaatttaccaaagaagaattggttcagaagctcagttccaccacaaaaagtgcagatcacttaaacggcctgcttcgggaaacagaagcaaccaatgcaattcttatggagcaaattaagcttctcaaaagtgaaataagaagattggaaaggaatcaagagcgagagaagtctgcagctaacctggaatacttgaagaacgtcttgctgcagttcattttcttgaaaccaggtagtgaaagagagagacttcttcctgttataaatacgatgttgcagctcagccctgaagaaaagggaaaacttgctgcggttgctcaaggtgaggaagaaaatgcttcccgttcttctggatgggcatcctatcttcatagttggtctggacttcgatag

SEQ ID NO: 26 - DNA, 1773 bp, Homo sapiens;
atggagctggaaaacatcgtggccaacacggtcttgctgaaagccagggaagggggcggaggaaagcgcaaagggaaaagcaagaagtggaaagaaatcctgaagttccctcacattagccagtgtgaagacctccgaaggaccatagacagagattactgcagtttatgtgacaagcagccaatcgggaggctgcttttccggcagttttgtgaaaccaggcctgggctggagtgttacattcagttcctggactccgtggcagaatatgaagttactccagatgaaaaactgggagagaaagggaaggaaattatgaccaagtacctcaccccaaagtcccctgttttcatagcccaagttggccaagacctggtctcccagacggaggagaagctcctacagaagccgtgcaaagaactcttttctgcctgtgcacagtctgtccacgagtacctgaggggagaaccattccacgaatatctggacagcatgttttttgaccgctttctccagtggaagtggttggaaaggcaaccggtgaccaaaaacactttcaggcagtatcgagtgctaggaaaagggggcttcggggaggtctgtgcctgccaggttcgggccacgggtaaaatgtatgcctgcaagcgcttggagaagaagaggatcaaaaagaggaaaggggagtccatggccctcaatgagaagcagatcctcgagaaggtcaacagtcagtttgtggtcaacctggcctatgcctacgagaccaaggatgcactgtgcttggtcctgaccatcatgaatgggggtgacctgaagttccacatctacaacatgggcaaccctggcttcgaggaggagcgggccttgttttatgcggcagagatcctctgcggcttagaagacctccaccgtgagaacaccgtctaccgagatctgaaacctgaaaacatcctgttagatgattatggccacattaggatctcagacctgggcttggctgtgaagatccccgagggagacctgatccgcggccgggtgggcactgttggctacatggctccagaggtcctgaacaaccagaggtacggcctgagccccgactactggggccttggctgcctcatctatgagatgatcgagggccagtcgccgttccgcggccgcaaggagaaggtgaagcgggaggaggtggaccgccgggtcctggagacggaggaggtgtactcccacaagttctccgaggaggccaagtccatctgcaagatgctgctcacgaaagatgcgaagcagaggctgggctgccaggaggagggggctgcagaggtcaagagacaccccttcttcaggaacatgaacttcaagcgcttagaagccgggatgttggaccctcccttcgttccagacccccgcgctgtgtactgtaaggacgtgctggacatcgagcagttctccactgtgaagggcgtcaatctggaccacacagacgacgacttctactccaagttctccacgggctctgtgtccatcccatggcaaaacgagatgatagaaacagaatgctttaaggagctgaacgtgtttggacctaatggtaccctcccgccagatctgaacagaaaccaccctccggaaccgcccaagaaagggctgctccagagactcttcaagcggcagcatcagaacaattccaagagttcgcccagctccaagaccagttttaaccaccacataaactcaaaccatgtcagctcgaactccaccggaagcagctag

SEQ ID NO: 27 - DNA, 1974 bp, Homo sapiens;
atgcccagatacacggtgcacgtacgtggggaatggctggcagtgccctgccaggacgcgcagctcactgtgggctggctgggccgggaggccgtgaggcgctatatcaagaataagcccgacaatggtggcttcacctccgtggatgacgcgcacttccttgtgcgccggtgcaagggcctgggcctgctggacaacgaggaccggctcgaggtggccctagagaacaacgagttcgtggaagtggttatagagggtgatgccatgtctcctgacttcattccatctcaaccagaaggagtttatctatacagcaagtaccgggagcctgaaaagtacatcgagttagatggagaccgtctgaccacggaggatctggtcaacttgggaaagggacgctacaaaataaagctcaccccaacagctgagaagagggtgcagaaatccagggaggtcatagatagcatcataaaagagaaaacagttgtttacggtattactacaggttttgggaaatttgccagaactgtaattcctatcaataagctacaggagcttcaggtcaacttagtacgctcacattcttcaggtgttgggaaaccactaagtcctgagaggtgtcggatgctcttggctttaaggatcaatgtcttagccaaaggatacagtggcatttccctggagaccctcaaacaagtcatagaaatgtttaatgcctcctgcctgccctatgtcccagagaaaggaaccgttggtgccagtggagaccttgccccactctctcatcttgctcttgggctagttggagaagggaagatgtggtctccgaagagtggctgggctgatgctaaatacgtgctagaagcccatggattgaaaccagttattttaaaaccaaaagagggcctggcactcatcaatgggacgcagatgatcacatccctgggctgtgaagctgtagagcgagccagtgctattgcacggcaggctgacattgtggcagccctgacccttgaggtgctgaagggcaccaccaaagcctttgacactgacattcatgctcttcgacctcaccgtgggcaaattgaagttgcttttcggtttcggtcactcttggactcagatcaccacccatcagaaatagcagagagtcacaggttctgtgatcgcgtccaggatgcatacaccttgcgctgctgtccacaggtccatggtgtggtgaatgatacaatagcatttgtgaagaacatcattaccacagaactgaacagcgcaacagataatcctatggtctttgccaataggggagagacagtttctggaggaaacttccatggtgaatacccagccaaagccctagactacttggccattggcatccatgaacttgctgcaatcagtgagagaagaatcgagcggctctgcaatccctccctcagtgagctgcctgccttcctggtggctgaaggtggtctgaactctgggttcatgatagctcactgcacggcagcagcccttgtttctgagaacaaggctctgtgccatccctcgtctgttgactccctctccaccagcgcagccacggaggaccacgtctccatgggaggatgggcagcaaggaaagccctcagggtcatcgagcatgtggagcaagtgctggccatcgagctccttgcagcctgccagggcatagagtttctacgtcccctgaaaacaaccactccgctggagaaggtctatgacctggtgcgctctgttgtaaggccctggataaaagatcgcttcatggccccggacatcgaggcagcccacaggctgctcctggagcagaaggtttgggaagtagctgctccatacattgaaaaatacagaatggagcatattccagaatcaagacctctttctccaacagccttttcactgcaatttctgcacaagaaatccaccaaaatcccggagtctgaggacctttaa

SEQ ID NO: 28 - DNA, 1461 bp, Homo sapiens;
atgtggaagtctgtagtgggccatgatgtgtctgtttccgtggagacccagggtgatgattgggacacagatcctgactttgtgaatgacatctctgaaaaggagcaacgatggggagccaagaccatcgaggggtctggacgcacagaacacatcaacatccaccagctgaggaacaaagtatcagaggagcatgatgttctcaggaagaaagagatggagtcagggcccaaagcatcccatggctatggaggtcggtttggagtagaaagagaccgaatggacaagagtgcagtgggccatgagtatgttgccgaggtggagaagcactcttctcagacggatgctgccaaaggctttgggggcaagtacggagttgagagggacagggcagacaagtcagcagtcggctttgattataaaggagaagtggagaagcacacatctcagaaagattactctcgtggctttggtggccggtacggggtggagaaggataaatgggacaaagcagctctgggatatgactacaagggagagacggagaaacacgagtcccagagagattatgccaagggctttggtggccagtatggaatccagaaggaccgagtggataagagcgctgtcggcttcaatgaaatggaggccccgaccacagcttataagaagacgacgcccatagaagccgcttctagtggtacccgtgggctgaaggcgaaatttgagtccatggctgaggagaagaggaagcgagaggaagaggagaaggcacagcaggtggccaggaggcaacaggagcgaaaggctgtgacaaagaggagccctgaggctccacagccagtgatagctatggaagagccagcagtaccggccccactgcccaagaaaatctcctcagaggcctggcctccagttgggactcctccatcatcagagtctgagcctgtgagaaccagcagggaacacccagtgcccttgctgcccattaggcagactctcccggaggacaatgaggagcccccagctctgccccctaggactctggaaggcctccaggtggaggaagagccagtgtacgaagcagagcctgagcctgagcccgagcctgagcccgagcctgagaatgactatgaggacgttgaggagatggacaggcatgagcaggaggatgaaccagagggggactatgaggaggtgctcgagcctgaagattcttctttttcttctgctctggctggatcatcaggctgcccggctggggctggggctggggctgtggctctggggatctcagctgtggctgtatatgattaccaaggagagggaagtgatgagctttcctttgatccggacgacgtaatcactgacattgagatggtggacgagggctggtggcggggacgttgccatggccactttggactcttccctgcaaattatgtcaagcttctggagtga

SEQ ID NO: 29 - DNA, 2772 bp, Homo sapiens;
atggactccattgggtcttcagggttgcggcagggggaagaaaccctgagttgctctgaggagggcttgcccgggccctcagacagctcagagctggtgcaggagtgcctgcagcagttcaaggtgacaagggcacagctacagcagatccaagccagcctcttgggttccatggagcaggcgctgaggggacaggccagccctgcccctgcggtccggatgctgcctacatacgtggggtccaccccacatggcactgagcaaggagacttcgtggtgctggagctgggggccacaggggcctcactgcgtgttttgtgggtgactctaactggcattgaggggcatagggtggagcccagaagccaggagtttgtgatcccccaagaggtgatgctgggtgctggccagcagctctttgactttgctgcccactgcctgtctgagttcctggatgcgcagcctgtgaacaaacagggtctgcagcttggcttcagcttctctttcccttgtcaccagacgggcttggacaggagcaccctcatttcctggaccaaaggttttaggtgcagtggtgtggaaggccaggatgtggtccagctgctgagagatgccattcggaggcagggggcctacaacatcgacgtggttgctgtggtgaacgacacagtgggcaccatgatgggctgtgagccgggggtcaggccgtgtgaggttgggctagttgtagacacgggcaccaacgcgtgttacatggaggaggcacggcatgtggcagtgctggacgaagaccggggccgcgtctgcgtcagcgtcgagtggggctccttcagcgatgatggggcgctgggaccagtgctgaccaccttcgaccataccctggaccatgagtccctgaatcctggtgctcagaggtttgagaagatgatcggaggcctgtacctgggtgagctggtgcggctggtgctggctcacttggcccggtgtggggtcctctttggtggctgcacctcccctgccctgctgagccaaggcagcatcctcctggaacacgtggctgagatggaggacccctctactggggcagcccgtgtccatgctatcctgcaggacttgggcctgagccctggggcttcggatgttgagcttgtgcagcacgtctgtgcggccgtgtgcacgcgggctgcccagctctgtgctgccgccctggccgctgttctctcctgcctccagcacagccgggagcaacaaacactccaggttgctgtggccaccggaggccgagtgtgtgagcggcaccccaggttctgcagcgtcctgcaggggacagtgatgctcctggccccggaatgcgatgtctccttaatcccctctgtggatggtggtggccggggagtggcgatggtgactgccgtggctgcccgtctggctgcccaccggcgcctgctggaggagaccctggccccattccggttgaaccatgatcaactggctgcggttcaggcacagatgcggaaggccatggccaaggggctccgaggggaggcctcctcccttcgcatgctgcccactttcgtccgggccacccctgacggcagcgagcgaggggatttcctggccctggacctcgggggcacgaacttccgtgtcctcctggtacgtgtgaccacaggcgtgcagatcaccagcgagatctactccattcccgagactgtggcccagggttctgggcagcagctctttgaccacatcgtggactgcatcgtggacttccagcagaagcagggcctgagcgggcagagcctcccactgggttttaccttctccttcccatgtaggcagcttggcctagaccagggcatcctcctgaactggaccaagggtttcaaggcatcagactgcgagggccaagatgtcgtgagtctgttgcgggaagccatcactcgcagacaggcagtggagctgaatgtggttgccattgtcaatgacacggtggggaccatgatgtcctgtggctatgaggacccccgttgcgagataggcctcattgtcggaaccggcaccaatgcctgctacatggaggagctccggaatgtggcgggcgtgcctggggactcaggccgcatgtgcatcaacatggagtggggcgcctttggggacgatggctctctggccatgctcagcacccgctttgatgcaagtgtggaccaggcgtccatcaaccccggcaagcagaggtttgaaaagatgatcagcggcatgtacctgggggagatcgtccgccacatccttttacatttaaccagccttggcgttctcttccggggccagcagatccagcgccttcagaccagggacatcttcaagaccaagttcctctctgagatcgaaagtgacagcctggccctgcggcaggtccgagccatcctagaggatctggggctacccctgacctcagatgacgccctgatggtgctagaggtgtgccaggctgtgtcccagagggctgcccagctctgtggggcgggtgtagctgccgtggtggagaagatccgggagaaccggggcctggaagagctggcagtgtctgtgggggtggatggaacgctctacaagctgcacccgcgcttctccagcctggtggcggccacagtgcgggagctggcccctcgctgtgtggtcacgttcctgcagtcagaggatgggtccggcaaaggtgcggccctggtcaccgctgttgcctgccgccttgcgcagttgactcgtgtctga

SEQ ID NO: 30 - DNA, 1899 bp, Homo sapiens;
atgaatagatacacaacaatcaggcagctcggggatggaacctacggttccgtcctgctgggaagaagcattgagtctggggagctgatcgctattaaaaaaatgaaaagaaaattttattcctgggaggaatgcatgaaccttcgggaggttaagtctttaaagaagctcaaccatgccaatgtagtcaaattaaaagaagttatcagggaaaatgatcatctttattttatcttcgagtacatgaaggaaaatctttaccagctcattaaagagagaaataagttgtttcctgagtctgctataaggaatatcatgtatcagatattacaaggactcgcatttattcacaaacacggcttctttcatcgagacttaaagcctgagaacctcctctgcatgggaccagaacttgtgaaaattgcagactttggtttggcccgagaaatacgatcaaaacctccatatacagattatgtatctaccagatggtacagggctccagaagtactcctgaggtctaccaactacagctcccccattgacgtctgggcggtgggctgcatcatggcagaagtttacaccctcaggccactcttccctggagccagtgaaattgacacaatattcaaaatttgccaagtgctggggacaccaaaaaagactgactggcctgaaggctatcaactttcaagtgcaatgaacttccgttggccacagtgtgtacccaataacttaaagaccttgattcccaatgctagcagtgaagcagtccagctcctgagagacatgcttcagtgggatcccaagaaacgaccaacagctagtcaggcacttcgatatccttacttccaagttggacacccactaggcagcaccacacaaaaccttcaggattcagaaaaaccacagaaaggcatcctggaaaaggcaggcccacctccttatattaagccagtcccacctgcccagccaccagccaagccacacacacgaatttcttcacgacagcatcaagccagccagccccctctgcatctcacgtacccctacaaagcagaggtctccaggacagatcacccaagccatctccaggaggacaagccaagcccgttgcttttcccatccctccacaacaagcatccacagtcgaaaatcacagctggcctggagcacaaaaatggtgagataaagccaaagagtaggagaaggtggggtcttatttccaggtcaacaaaggattcagatgattgggctgacttggatgacttggatttcagtccatccctcagcaggattgacctgaaaaacaagaaaagacagagtgatgacactctctgcaggtttgagagtgttttggacctgaagccctctgagcctgtgggcacaggaaacagtgcccccacccagacgtcatatcagcggcgagacacgcccaccctgagatctgcagccaagcagcactatttgaagcactctcgatacttgcctgggatcagtataagaaatggcatactctcgaatccaggcaaggaatttattccacctaatccatggtctagttctggcttgtctggaaaatcttcagggacaatgtcagtaatcagcaaagtaaattcagttggttccagctctacaagttctagtggactgactggaaactatgtcccttcctttctgaaaaaagaaatcggttctgctatgcagagggtacacctagcacctattccagacccttcccctggttattcctccctgaaggccatgagacctcatcctgggcgaccattcttccacacccagcctagaagcactcctgggttgataccacggcctccagccgcccagccagtgcatggccggacagactgggcttccaagtacgcatctcggcgatga

SEQ ID NO: 31 - DNA, 849 bp, Homo sapiens;
atggagcggccgtcgctgcgcgccctgctcctcggcgccgctgggctgctgctcctgctcctgcccctctcctcttcctcctcttcggacacctgcggcccctgcgagccggcctcctgcccgcccctgcccccgctgggctgcctgctgggcgagacccgcgacgcgtgcggctgctgccctatgtgcgcccgcggcgagggcgagccgtgcgggggtggcggcgccggcagggggtactgcgcgccgggcatggagtgcgtgaagagccgcaagaggcggaagggtaaagccggggcagcagccggcggtccgggtgtaagcggcgtgtgcgtgtgcaagagccgctacccggtgtgcggcagcgacggcaccacctacccgagcggctgccagctgcgcgccgccagccagagggccgagagccgcggggagaaggccatcacccaggtcagcaagggcacctgcgagcaaggtccttccatagtgacgccccccaaggacatctggaatgtcactggtgcccaggtgtacttgagctgtgaggtcatcggaatcccgacacctgtcctcatctggaacaaggtaaaaaggggtcactatggagttcaaaggacagaactcctgcctggtgaccgggacaacctggccattcagacccggggtggcccagaaaagcatgaagtaactggctgggtgctggtatctcctctaagtaaggaagatgctggagaatatgagtgccatgcatccaattcccaaggacaggcttcagcatcagcaaaaattacagtggttgatgccttacatgaaataccagtgaaaaaaggtgaaggtgccgagctataa

SEQ ID NO: 32 - DNA, 1674 bp, Homo sapiens;
atgccggagcgagatagtgagccgttctccaaccctttggcccccgatggccacgatgtggatgatcctcactccttccaccaatcaaaactcaccaatgaagacttcaggaaacttctcatgacccccagggctgcacctacctctgcaccaccttctaagtcacgtcaccatgagatgccaagggagtacaatgaggatgaagacccagctgcacgaaggaggaaaaagaaaagttattatgccaagctacgccaacaagaaattgagagagagagagagctagcagagaagtaccgggatcgtgccaaggaacggagagatggagtgaacaaagattatgaagaaaccgagcttatcagcaccacagctaactatagggctgttggccccactgctgaggcggacaaatcagctgcagagaagagaagacagttgatccaggagtccaaattcttgggtggtgacatggaacacacccatttggtgaaaggcttggattttgctctgcttcaaaaggtacgagctgagattgccagcaaagagaaagaggaagaggaactgatggaaaagccccagaaagaaaccaagaaagatgaggatcctgaaaataaaattgaatttaaaacacgtctgggccgcaatgtttaccgaatgctttttaagagcaaagcatatgagcggaatgagttgttcctgccgggccgcatggcctatgtggtagacctggatgatgagtatgctgacacagatatccccaccactcttatccgcagcaaggctgattgccccaccatggaggcccagaccacactgaccacaaatgacattgtcattagcaagctgacccagatcctttcatacctgaggcagggaacccgtaacaagaagcttaagaagaaggataaagggaagctggaagagaagaaacctcctgaggctgacatgaatatttttgaagacattggggattacgtaccctccacaaccaagacacctcgggacaaggagcgggagagatatcgggaacgggagcgtgatcgggaaagagacagagaccgtgaccgagagcgagagcgagaacgagatcgggaacgagagcgagagcgggaccgagagagagaagaggaaaagaagagacacagctactttgagaagccaaaagtagatgatgagcccatggacgttgacaaaggacctgggtctaccaaggagttgatcaagtccatcaatgaaaagtttgctgggtctgctggctgggaaggcacagaatcgctgaagaagccagaagacaaaaagcagctgggagatttctttggcatgtccaacagttatgcagagtgctacccagccacgatggatgacatggctgtggatagtgatgaggaggtggattatagcaaaatggaccagggtaacaagaaggggcccttaggccgttgggactttgatacccaggaagaatacagcgagtatatgaacaacaaagaagctttgcccaaggctgcattccagtatggtatcaaaatgtctgaagggcggaaaaccaggcgcttcaaggaaaccaatgacaaagcagagcttgatcgccagtggaagaagattagtgcaatcattgagaagaggaagaagatggaagctgatggggttgaagtcaaaagaccaaaatactaa

SEQ ID NO: 33 - DNA, 1260 bp, Homo sapiens;
atgggtgaaaaaaaaccagagcctttggacttcgtgaaagattttcaggaatacctgactcagcagacccatcacgtgaacatgatttctggatcagttagtggggacaaagaagcagaggctcttcagggagctggaacagatggtgatcaaaatggacttgatcacccatctgttgaagtttccttggatgaaaactcaggaatgttagtagacgggtttgaaaggacctttgatgggaagcttaagtgtcggtactgcaactatgccagcaaaggaacagcccggcttattgaacacatcagaatccacacaggtgaaaaacctcatcgatgtcatctttgtccatttgcatctgcttatgagcgtcatctggaagcccatatgcgttctcatactggagaaaaaccatacaaatgtgaattatgttccttccgctgcagtgatcgaagtaacttgtcccatcatcgaaggcgcaagcataaaatggtaccaattaaaggtactaggtcttccttaagcagcaagaaaatgtggggggttttacagaagaaaacaagcaatctgggctatagcagaagagcactaatcaacttaagtccaccttccatggtggttcagaaaccagactaccttaacgattttacccacgaaatcccaaatatccagactgactcctatgaaagtatggcaaaaaccacaccaactggtggccttccaagggacccccaagaactcatggttgataaccctttgaatcagctctcgactctagcagggcagttgtccagtctgccacccgaaaaccaaaaccctgcatcccctgatgtagttccctgccctgatgaaaagcctttcatgattcagcagccctctacccaagcagtagtttctgccgtatcagcaagtattcctcagagctcctctcccacaagcccagaacctcggccatcccatagtcaaaggaactatagtccagtggcaggtccaagcagtgagccaagtgcccacacgagcactcccagcataggaaacagccagccaagcaccccagccccagccctgccggtccaggaccctcagcttctgcaccactgccagcactgtgatatgtactttgcagacaacatcctttacactattcatatgggatgtcatgggtatgaaaatccttttcagtgtaatatatgtggatgcaaatgtaaaaacaagtatgattttgcctgtcattttgcaagagggcaacataaccaacattga

SEQ ID NO: 34 - DNA, 1656 bp, Homo sapiens;
atggcggcccctgctctgtcctggcgtctgcccctcctcatcctcctcctgcccctggctacctcttgggcatctgcagcggtgaatggcacttcccagttcacatgcttctacaactcgagagccaacatctcctgtgtctggagccaagatggggctctgcaggacacttcctgccaagtccatgcctggccggacagacggcggtggaaccaaacctgtgagctgctccccgtgagtcaagcatcctgggcctgcaacctgatcctcggagccccagattctcagaaactgaccacagttgacatcgtcaccctgagggtgctgtgccgtgagggggtgcgatggagggtgatggccatccaggacttcaagccctttgagaaccttcgcctgatggcccccatctccctccaagttgtccacgtggagacccacagatgcaacataagctgggaaatctcccaagcctcccactactttgaaagacacctggagttcgaggcccggacgctgtccccaggccacacctgggaggaggcccccctgctgactctcaagcagaagcaggaatggatctgcctggagacgctcaccccagacacccagtatgagtttcaggtgcgggtcaagcctctgcaaggcgagttcacgacctggagcccctggagccagcccctggccttcaggacaaagcctgcagcccttgggaaggacaccattccgtggctcggccacctcctcgtgggcctcagcggggcttttggcttcatcatcttagtgtacttgctgatcaactgcaggaacaccgggccatggctgaagaaggtcctgaagtgtaacaccccagacccctcgaagttcttttcccagctgagctcagagcatggaggagacgtccagaagtggctctcttcgcccttcccctcatcgtccttcagccctggcggcctggcacctgagatctcgccactagaagtgctggagagggacaaggtgacgcagctgctcctgcagcaggacaaggtgcctgagcccgcatccttaagcagcaaccactcgctgaccagctgcttcaccaaccagggttacttcttcttccacctcccggatgccttggagatagaggcctgccaggtgtactttacttacgacccctactcagaggaagaccctgatgagggtgtggccggggcacccacagggtcttccccccaacccctgcagcctctgtcaggggaggacgacgcctactgcaccttcccctccagggatgacctgctgctcttctcccccagtctcctcggtggccccagccccccaagcactgcccctgggggcagtggggccggtgaagagaggatgcccccttctttgcaagaaagagtccccagagactgggacccccagcccctggggcctcccaccccaggagtcccagacctggtggattttcagccaccccctgagctggtgctgcgagaggctggggaggaggtccctgacgctggccccagggagggagtcagtttcccctggtccaggcctcctgggcagggggagttcagggcccttaatgctcgcctgcccctgaacactgatgcctacttgtccctccaagaactccagggtcaggacccaactcacttggtgtag

SEQ ID NO: 35 - DNA, 1800 bp, Homo sapiens;
atggaggggccactcactccaccaccgctgcagggaggcggagccgccgctgttccggagcccggagcccggcaacacccgggacacgagacggcggcgcagcggtacagcgcccgactgctgcaggccggctacgagcccgagagccctagattggacctcgctacacacccgacgacaccccgttcagaactatcttcagtggtcttactggcaggtgttggtgtccagatggatcgccttcgcagggctagcatggcggactacctgatcagcggcggcaccggctacgtgcccgaggatgggctcaccgcgcagcagctcttcgccagcgccgacggcctcacctacaacgacttcctgattctcccaggattcatagacttcatagctgatgaggtggacctgacctcagccctgacccggaagatcacgctgaagacgccactgatctcctcccccatggacactgtgacagaggctgacatggccattgccatggctctgatgggaggtattggtttcattcaccacaactgcaccccagagttccaggccaacgaggtgcggaaggtcaagaagtttgaacagggcttcatcacggaccctgtggtgctgagcccctcgcacactgtgggcgatgtgctggaggccaagatgcggcatggcttctctggcatccccatcactgagacgggcaccatgggcagcaagctggtgggcatcgtcacctcccgagacatcgactttcttgctgagaaggaccacaccaccctcctcagtgaggtgatgacgccaaggattgaactggtggtggctccagcaggtgtgacgttgaaagaggcaaatgagatcctgcagcgtagcaagaaagggaagctgcctatcgtcaatgattgcgatgagctggtggccatcatcgcccgcaccgacctgaagaagaaccgagactaccctctggcctccaaggattcccagaagcagctgctctgtggggcagctgtgggcacccgtgaggatgacaaataccgtctggacctgctcacccaggcgggcgtcgacgtcatagtcttggactcgtcccaagggaattcggtgtatcagatcgccatggtgcattacatcaaacagaagtacccccacctccaggtgattggggggaacgtggtgacagcagcccaggccaagaacctgattgatgctggtgtggacgggctgcgcgtgggcatgggctgcggctccatctgcatcacccaggaagtgatggcctgtggtcggccccagggcactgctgtgtacaaggtggctgagtatgcccggcgctttggtgtgcccatcatagccgatggcggcatccagaccgtgggacacgtggtcaaggccctggcccttggagcctccacagtgatgatgggctccctgctggccgccactacggaggcccctggcgagtacttcttctcagacggggtgcggctcaagaagtaccggggcatgggctcactggatgccatggagaagagcagcagcagccagaaacgatacttcagcgagggggataaagtgaagatcgcgcagggtgtctcgggctccatccaggacaaaggatccattcagaagttcgtgccctacctcatagcaggcatccaacacggctgccaggatatcggggcccgcagcctgtctgtccttcggtccatgatgtactcaggagagctcaagtttgagaagcggaccatgtcggcccagattgagggtggtgtccatggcctgcactcttacgaaaagcggctgtactga

SEQ ID NO: 36 - DNA, 3567 bp, Homo sapiens;
atggtcccctgctggaaccatggcaacatcacccgctccaaggcggaggagctgctttccaggacaggcaaggacgggagcttcctcgtgcgtgccagcgagtccatctcccgggcatacgcgctctgcgtgctgtatcggaattgcgtttacacttacagaattctgcccaatgaagatgataaattcactgttcaggcatccgaaggcgtctccatgaggttcttcaccaagctggaccagctcatcgagttttacaagaaggaaaacatggggctggtgacccatctgcaataccctgtgccgctggaggaagaggacacaggcgacgaccctgaggaggacacagaaagtgtcgtgtctccacccgagctgcccccaagaaacatcccgctgactgccagctcctgtgaggccaaggaggttcctttttcaaacgagaatccccgagcgaccgagaccagccggccgagcctctccgagacattgttccagcgactgcaaagcatggacaccagtgggcttccagaagagcatcttaaggccatccaagattatttaagcactcagctcgcccaggactctgaatttgtgaagacagggtccagcagtcttcctcacctgaagaaactgaccacactgctctgcaaggagctctatggagaagtcatccggaccctcccatccctggagtctctgcagaggttatttgaccagcagctctccccgggcctccgtccacgtcctcaggttcctggtgaggccaatcccatcaacatggtgtccaagctcagccaactgacaagcctgttgtcgtccattgaagacaaggtcaaggccttgctgcacgagggtcctgagtctccgcaccggccctcccttatccctccagtcacctttgaggtgaaggcagagtctctggggattcctcagaaaatgcagctcaaagtcgacgttgagtctgggaaactgatcattaagaagtccaaggatggttctgaggacaagttctacagccacaagaaaatcctgcagctcattaagtcacagaaatttctgaataagttggtgatcttggtggaaacagagaaggagaagatcctgcggaaggaatatgtttttgctgactccaaaaagagagaaggcttctgccagctcctgcagcagatgaagaacaagcactcagagcagccggagcccgacatgatcaccatcttcatcggcacctggaacatgggtaacgccccccctcccaagaagatcacgtcctggtttctctccaaggggcagggaaagacgcgggacgactctgcggactacatcccccatgacatttacgtgatcggcacccaagaggaccccctgagtgagaaggagtggctggagatcctcaaacactccctgcaagaaatcaccagtgtgacttttaaaacagtcgccatccacacgctctggaacatccgcatcgtggtgctggccaagcctgagcacgagaaccggatcagccacatctgtactgacaacgtgaagacaggcattgcaaacacactggggaacaagggagccgtgggggtgtcgttcatgttcaatggaacctccttagggttcgtcaacagccacttgacttcaggaagtgaaaagaaactcaggcgaaaccaaaactatatgaacattctccggttcctggccctgggcgacaagaagctgagtccctttaacatcactcaccgcttcacgcacctcttctggtttggggatcttaactaccgtgtggatctgcctacctgggaggcagaaaccatcatccagaaaatcaagcagcagcagtacgcagacctcctgtcccacgaccagctgctcacagagaggagggagcagaaggtcttcctacacttcgaggaggaagaaatcacgtttgccccaacctaccgttttgagagactgactcgggacaaatacgcctacaccaagcagaaagcgacagggatgaagtacaacttgccttcctggtgtgaccgagtcctctggaagtcttatcccctggtgcacgtggtgtgtcagtcttatggcagtaccagcgacatcatgacgagtgaccacagccctgtctttgccacatttgaggcaggagtcacttcccagtttgtctccaagaacggtcccgggactgttgacagccaaggacagattgagtttctcaggtgctatgccacattgaagaccaagtcccagaccaaattctacctggagttccactcgagctgcttggagagttttgtcaagagtcaggaaggagaaaatgaagaaggaagtgagggggagctggtggtgaagtttggtgagactcttccaaagctgaagcccattatctctgaccctgagtacctgctagaccagcacatcctcatcagcatcaagtcctctgacagcgacgaatcctatggcgagggctgcattgcccttcggttagaggccacagaaacgcagctgcccatctacacgcctctcacccaccatggggagttgacaggccacttccagggggagatcaagctgcagacctctcagggcaagacgagggagaagctctatgactttgtgaagacggagcgtgatgaatccagtgggccaaagaccctgaagagcctcaccagccacgaccccatgaagcagtgggaagtcactagcagggcccctccgtgcagtggctccagcatcactgaaatcatcaaccccaactacatgggagtggggccctttgggccaccaatgcccctgcacgtgaagcagaccttgtcccctgaccagcagcccacagcctggagctacgaccagccgcccaaggactccccgctggggccctgcaggggagaaagtcctccgacacctcccggccagccgcccatatcacccaagaagtttttaccctcaacagcaaaccggggtctccctcccaggacacaggagtcaaggcccagtgacctggggaagaacgcaggggacacgctgcctcaggaggacctgccgctgacgaagcccgagatgtttgagaaccccctgtatgggtccctgagttccttccctaagcctgctcccaggaaggaccaggaatcccccaaaatgccgcggaaggaacccccgccctgcccggaacccggcatcttgtcgcccagcatcgtgctcaccaaagcccaggaggctgatcgcggcgaggggcccggcaagcaggtgcccgcgccccggctgcgctccttcacgtgctcatcctctgccgagggcagggcggccggcggggacaagagccaagggaagcccaagaccccggtcagctcccaggccccggtgccggccaagaggcccatcaagccttccagatcggaaatcaaccagcagaccccgcccaccccgacgccgcggccgccgctgccagtcaagagcccggcggtgctgcacctccagcactccaagggccgcgactaccgcgacaacaccgagctcccgcatcacggcaagcaccggccggaggaggggccaccagggcctctaggcaggactgccatgcagtga

SEQ ID NO: 37 - DNA, 3414 bp, Homo sapiens;
atggccggggctcggagccgcgacccttggggggcctccgggatttgctacctttttggctccctgctcgtcgaactgctcttctcacgggctgtcgccttcaatctggacgtgatgggtgccttgcgcaaggagggcgagccaggcagcctcttcggcttctctgtggccctgcaccggcagttgcagccccgaccccagagctggctgctggtgggtgctccccaggccctggctcttcctgggcagcaggcgaatcgcactggaggcctcttcgcttgcccgttgagcctggaggagactgactgctacagagtggacatcgaccagggagctgatatgcaaaaggaaagcaaggagaaccagtggttgggagtcagtgttcggagccaggggcctgggggcaagattgttacctgtgcacaccgatatgaggcaaggcagcgagtggaccagatcctggagacgcgggatatgattggtcgctgctttgtgctcagccaggacctggccatccgggatgagttggatggtggggaatggaagttctgtgagggacgcccccaaggccatgaacaatttgggttctgccagcagggcacagctgccgccttctcccctgatagccactacctcctctttggggccccaggaacctataattggaaggggttgctttttgtgaccaacattgatagctcagaccccgaccagctggtgtataaaactttggaccctgctgaccggctcccaggaccagccggagacttggccctcaatagctacttaggcttctctattgactcggggaaaggtctggtgcgtgcagaagagctgagctttgtggctggagccccccgcgccaaccacaagggtgctgtggtcatcctgcgcaaggacagcgccagtcgcctggtgcccgaggttatgctgtctggggagcgcctgacctccggctttggctactcactggctgtggctgacctcaacagtgatggctggccagacctgatagtgggtgccccctacttctttgagcgccaagaagagctggggggtgctgtgtatgtgtacttgaaccaggggggtcactgggctgggatctcccctctccggctctgcggctcccctgactccatgttcgggatcagcctggctgtcctgggggacctcaaccaagatggctttccagatattgcagtgggtgccccctttgatggtgatgggaaagtcttcatctaccatgggagcagcctgggggttgtcgccaaaccttcacaggtgctggagggcgaggctgtgggcatcaagagcttcggctactccctgtcaggcagcttggatatggatgggaaccaataccctgacctgctggtgggctccctggctgacaccgcagtgctcttcagggccagacccatcctccatgtctcccatgaggtctctattgctccacgaagcatcgacctggagcagcccaactgtgctggcggccactcggtctgtgtggacctaagggtctgtttcagctacattgcagtccccagcagctatagccctactgtggccctggactatgtgttagatgcggacacagaccggaggctccggggccaggttccccgtgtgacgttcctgagccgtaacctggaagaacccaagcaccaggcctcgggcaccgtgtggctgaagcaccagcatgaccgagtctgtggagacgccatgttccagctccaggaaaatgtcaaagacaagcttcgggccattgtagtgaccttgtcctacagtctccagacccctcggctccggcgacaggctcctggccaggggctgcctccagtggcccccatcctcaatgcccaccagcccagcacccagcgggcagagatccacttcctgaagcaaggctgtggtgaagacaagatctgccagagcaatctgcagctggtccgcgcccgcttctgtacccgggtcagcgacacggaattccaacctctgcccatggatgtggatggaacaacagccctgtttgcactgagtgggcagccagtcattggcctggagctgatggtcaccaacctgccatcggacccagcccagccccaggctgatggggatgatgcccatgaagcccagctcctggtcatgcttcctgactcactgcactactcaggggtccgggccctggaccctgcggagaagccactctgcctgtccaatgagaatgcctcccatgttgagtgtgagctggggaaccccatgaagagaggtgcccaggtcaccttctacctcatccttagcacctccgggatcagcattgagaccacggaactggaggtagagctgctgttggccacgatcagtgagcaggagctgcatccagtctctgcacgagcccgtgtcttcattgagctgccactgtccattgcaggaatggccattccccagcaactcttcttctctggtgtggtgaggggcgagagagccatgcagtctgagcgggatgtgggcagcaaggtcaagtatgaggtcacggtttccaaccaaggccagtcgctcagaaccctgggctctgccttcctcaacatcatgtggcctcatgagattgccaatgggaagtggttgctgtacccaatgcaggttgagctggagggcgggcaggggcctgggcagaaagggctttgctctcccaggcccaacatcctccacctggatgtggacagtagggataggaggcggcgggagctggagccacctgagcagcaggagcctggtgagcggcaggagcccagcatgtcctggtggccagtgtcctctgctgagaagaagaaaaacatcaccctggactgcgcccggggcacggccaactgtgtggtgttcagctgcccactctacagctttgaccgcgcggctgtgctgcatgtctggggccgtctctggaacagcacctttctggaggagtactcagctgtgaagtccctggaagtgattgtccgggccaacatcacagtgaagtcctccataaagaacttgatgctccgagatgcctccacagtgatcccagtgatggtatacttggaccccatggctgtggtggcagaaggagtgccctggtgggtcatcctcctggctgtactggctgggctgctggtgctagcactgctggtgctgctcctgtggaagatgggattcttcaaacgggcgaagcaccccgaggccaccgtgccccagtaccatgcggtgaagattcctcgggaagaccgacagcagttcaaggaggagaagacgggcaccatcctgaggaacaactggggcagcccccggcgggagggcccggatgcacaccccatcctggctgctgacgggcatcccgagctgggccccgatgggcatccagggccaggcaccgcctag

SEQ ID NO: 38 - DNA, 3741 bp, Homo sapiens;
atgagcaaggaaagacccaagaggaatatcattcagaagaaatacgatgacagtgatgggattccgtggtcagaagaacgggtggtacgtaaagtcctttatttgtctctgaaggagttcaagaattcccagaagaggcagcatgcggaaggcattgctgggagcctgaaaactgtgaatgggctccttggtaatgaccagtctaagggattaggaccagcatcagaacagtcagagaatgaaaaggacgatgcatcccaagtgtcctccactagcaacgatgttagttcttcagattttgaagaagggccgtcgaggaaaaggcccaggctgcaagcacaaaggaagtttgctcagtctcagccgaatagtcccagcacaactccagtaaagatagtggagccattgctaccccctccagctactcagatatcagacctctctaaaaggaagcctaagacagaagattttcttacctttctctgccttcgaggttctcctgcgctgcccaacagcatggtgtattttggaagctctcaggatgaggaggaagtcgaggaggaagatgatgagacagaagacgtcaaaacagccaccaacaatgcttcatcttcatgccagtcgacccccaggaaaggaaaaacccacaaacatgttcacaacgggcatgttttcaatggttccagcaggtcaacacgggagaaggaacctgttcaaaaacacaaaagcaaagaggccactcccgcaaaggagaagcacagcgatcaccgggctgacagccgccgggagcaggcttcagctaaccaccccgcagcggccccctccacgggttcctcggccaaggggcttgctgccacccatcaccacccccctctgcatcggtcggctcaggacttacggaaacaggtttctaaggtaaacggagtcactcgaatgtcatctctgggtgcaggtgtaaccagtgccaaaaagatgcgcgaggtcagaccttcaccatccaaaactgtgaagtacactgccacggtgacgaagggggctgtcacatacaccaaagccaagagagaactggtcaaggacaccaaacccaatcaccacaagcccagttccgctgtcaaccacacaatctcagggaaaactgaaagtagcaatgcaaaaacccgcaaacaggtgctatccctcgggggggcgtccaagtccactgggcccgccgtcaatggcctcaaggtcagtggcaggttgaacccaaagtcatgcactaaggaggtgggggggcggcagctgcgggagggcctgcagctgcgggaggggctgcggaactccaagaggagactggaagaggcacaccaggcggagaagccgcagtcgccccccaagaagatgaaaggggcggctggccccgccgaaggccctggcaagaaggccccggccgagagaggtctgctgaacggacacgtgaagaaggaagtgccggagcgcagtctggagaggaatcggccgaagcgggccacggccgggaagagcacgccaggcagacaagcacatggcaaggcggacagcgcctcctgtgaaaatcgttctacctcgcaaccggagtccgtgcacaagccgcaggactcgggcaaggccgagaagggcggcggcaaggccgggtgggcggccatggacgagatccccgtcctcaggccctccgccaaggagttccacgatccgctcatctacatcgagtcggtccgcgctcaggtggagaagttcgggatgtgcagggtgatcccccctccggactggcggcccgagtgcaagctcaacgatgagatgcggtttgtcacgcagattcagcacatccacaagctgggccggcgctggggccccaacgtgcagcggctggcctgcatcaagaagcacctcaaatctcagggcatcaccatggacgagctcccgctcatagggggctgtgagctcgacctggcctgctttttccggctgattaatgagatgggcggcatgcagcaagtgactgacctcaaaaaatggaacaaactagcagacatgctgcgcatccccagaactgcccaggaccggctggccaagctgcaggaggcctactgccagtacctactctcctacgactccctgtccccagaggagcaccggcggctggagaaggaggtgctgatggagaaggagatcctggagaagcgcaaggggccgctggaaggccacacagagaacgaccaccacaagttccaccctctgccccgcttcgagcccaagaatgggctcatccacggcgtggcccccaggaacggcttccgcagcaagctcaaggaggtgggccaggcccagttgaagactggccggcggcgactcttcgctcaggaaaaagaagtggtcaaggaagaggaggaggacaaaggcgtcctcaatgacttccacaagtgcatctataagggaaggtctgtttctctaacaactttttatcgaacagcgaggaatatcatgagcatgtgtttcagcaaggagcctgccccagccgaaatcgagcaagagtactggaggctagtggaagagaaggactgccacgtggcagtgcactgcggcaaggtggacaccaacactcacggcagtggattcccagtaggaaaatcagaacccttttcgaggcatggatggaacctcaccgtcctccccaataacacagggtccatcctgcgtcacctcggtgctgtgcctggagtgactattccctggctaaatattggcatggtcttttctacctcatgctggtctcgagaccaaaatcaccttccatacattgactacttacacactggtgctgactgcatttggtattgcattcctgctgaggaggagaacaagctggaagatgtggtccacaccctgctgcaagccaatggcaccccagggctgcagatgctggaaagcaacgtcatgatctccccggaggtgctgtgcaaagaggggatcaaggtgcacaggaccgtgcagcagagtggccagtttgtcgtctgcttcccgggatcctttgtgtccaaagtgtgctgtgggtacagcgtgtctgaaaccgtgcactttgctaccacccagtggacaagtatgggctttgagaccgccaaggaaatgaagcgtcgccatatagctaagccattctccatggagaagttactctaccagattgcacaagcagaagcaaaaaaagaaaacggtcccactctcagtaccatctcagccctcctggatgagctcagggatacagagctgcggcagcgcaggcagctgttcgaggctggcctccactcctccgcacgctatggcagccacgatggcagcagcacggtggcggacgggaagaaaaagcctcgaaagtggctgcagttggagacgtcagagaggaggtgtcagatctgccagcacctgtgctacctgtccatggtggtacaagagaacgaaaacgtcgtgttctgtctggagtgtgctctgcgccacgtggagaaacagaagtcctgccgagggctgaagttgatgtaccgctacgatgaggaacagattatcagtctggtcaatcagatctgcggcaaagtgtctggtaaaaacggcagcattgagaactgtctcagtaaacccacaccaaaaagaggtccccgcaagagagcgacagtggacgtgcccccctcccgtctgtcagcctccagttcatccaaaagtgcttcgagctcatcatga

SEQ ID NO: 39 - DNA, 336 bp, Homo sapiens;
atggtgcggactaaagcagacagtgttccaggcacttacagaaaagtggtggctgctcgagcccccagaaaggtgcttggttcttccacctctgccactaattcgacatcagtttcatcgaggaaagctgaaaataaatatgcaggagggaaccccgtttgcgtgcgcccaactcccaagtggcaaaaaggaattggagaattctttaggttgtcccctaaagattctgaaaaagagaatcagattcctgaagaggcaggaagcagtggcttaggaaaagcaaagagaaaagcatgtcctttgcaacctgatcacacaaatgatgaaaaagaatag

SEQ ID NO: 40 - DNA, 3213 bp, Homo sapiens;
atgtattgctgcagtgcccaggacagtaaaatggactacaagcggcgcttcctgcttggcgggtccaagcagaaggtgcagcagcaccagcaatacccgatgcctgagctgggccgagcactgagtgctcccctggcatccacggccaccactgcccccctgggcagtctgaccgctgcaggcagctgccaccatgccatgccccacactactcctatcgccgacatccagcagggcatctccaagtatctggatgccctgaacgtcttctgccgtgccagtactttcctcacagatctcttcagcactgtgttcaggaactctcactactcaaaggcagccacacagctcaaagatgtgcaggagcatgtcatggaagcagccagtcggctgacctcggccataaagcctgagatcgccaagatgctaatggaacttagtgctggggctgcaaattttacggatcagaaggaattcagtctccaggacattgaggtgttggggcgatgtttcctgactgtggtgcaagtccatttccagtttttgactcatgcgttacagaaggtccagccggtggctcactcttgctttgctgaggtcatcgtgccagaaaaaaagaacagcggcagtggcggcggcttatctggcatgggccacacacctgaagtagaggaagctgtgcggtcctggcggggggctgctgaggcgacatctagactaagagaaagaggctgtgatggttgcctggcaggaattgaagttcaacaactcttttgttctcaaagtgcagcaattcctgagcaccagctaaaagaactgaacataaaaatcgacagtgctttgcaagcatataagatagctctggaaagcttaggacactgtgaatatgcaatgaaagccggcttccacctgaatccaaaggcgattgaagcaagtttgcagggctgctgcagcgaggcggaagcccagcagacggggcggaggcagacacccccgcagcccatgcagtgtgagctccccaccgtccctgtgcagataggatcgcacttcctgaagggcgtctcctttaatgagtcggccgccgacaatctgaaacttaagacgcatacaatgttacagctgatgaaggaggcaggctgctataatggaatcacatccagggatgattttcctgtgactgaagtgctgaaccaggtttgcccttccacatggcgaggtgcctgcaagacggcggtgcagctgctgtttggccaggctggactggtggtggttgacacagcacagattgagaataaagaagcctatgccccccagatcagtttagaaggctctagaatcgtggttcaagtcccatccacatggtgcctgaaagaagaccctgctaccatgtccctgctgcagagaagccttgatcctgagaagaccctgggtctagtggacgtgctctacacagctgtgctggacctaaaccgctggagggctggaagggagcaagctttaccctgcatacagatccagctgcaaagggagatctgtgattttggcaaccaggctgacctgccttctggaaatggaaacaaatcttcaggtggcctgcagaagacattctccaaactgacatcccggttcaccaagaaagcttcatgtaccagctccagcagcagcacaaattattccatccaaaataccccttccaaaaacatcttcatagctggatgttccgaagagaaggccaaaatgcctggcaatattgatacaaggttacaaagcattttgaacattggtaatttccccaggactacagacccttcacagtcagctcagaattccagtaatacagtggccaatggctttctcatggagaggcgtgagaacttcctgcatggagatgacggcaaggatgagaagggtatgaacttaccaactgatcaggaaatgcaagaggtgatagattttctctcgggctttaacatgggccagtcacatcagggctctccgttggtgacaaggcataattctgctgccacagccatggtgactgagcagaaggcaggagccatgcaaccacagcagccgtcactgcctgtgccccctccaccacgggcaccccaggctggggcacacacacctctgacaccccagccgggactggcacctcagcagcagtccccaaagcagcaacaacctcaagtccaatactaccaacacctactccagcccattggaccgcagcagcccccgccccagcctcgggcacctgggaaatgggtacatggctcatcccagcagccagcgcaggctgttggagcaggtctgtctcctcttggtcagtggcctggcatatctgatctcagttctgacttgtacagcttgggtctggtgagcagctatatggataatgtgatgtcagaggttctgggacagaagccgcagggacctagaaataacacctggcccaaccgtgaccaaagtgatggagtctttggaatgctgggagagattctgccttttgatcctgcagtgggctcagacccagagtttgcacgctatgtggcaggagtgagccaggcgatgcagcagaagcggcaggcccagcacggtcgccggccaggcaacccccggggcaactggccgcctatggatgacgcgcatcggacctggcccttccccgagttcttcacagaaggggatggcctgcacggtggctggtcgggtgctcagggagactctgccagctcgagtgatgagacatcctcagccaacggggacagcttgttctccatgttttcagggcctgacctcgttgctgctgtcaagcagagaaggaaacacagcagtggagagcaagacaccagcacgctgccctcaccacctctcctcaccacggtggaggatgtgaaccaggataacaaaaccaaaacgtggccacccaaagcaccctggcagcacccttccccgcttcccagcacgctgcccagccccagcgcaccactctatgcagtcaccagccctggcagccagtggaacgacaccatgcagatgctgcagtccccagtgtgggccgcaaccaacgactgcagtgccgctgccttctcctatgtgcagaccccaccccagcccccacccccaccagcacacaaggcagcacccaagggcttcaaggccttccctgggaagggtgagcgcaggccagcctatctgccccagtactga

SEQ ID NO: 41 - DNA, 1845 bp, Homo sapiens;
atgtccgcggggagcgcgacacatcctggagctggcgggcgccgcagcaaatgggaccaaccagctccagccccacttctcttcctcccgccagcggccccaggtggggaggtcaccagcagtgggggaagtcctgggggcaccacagctgctccttcaggagccttggatgctgctgctgctgtggctgccaagattaatgccatgctcatggcaaaagggaagctgaaaccaactcagaatgcttctgagaagcttcaggctcctggcaaaggcctaactagcaataaaagcaaggatgacctggtggtagctgaagtagaaattaatgatgtgcctctcacatgtaggaacttgctgactcgaggacagactcaagacgagatcagccgacttagtggggctgcagtatcaactcgagggaggttcatgacaactgaggaaaaagccaaagtgggaccaggggatcgtccattatatcttcatgttcagggccagacacgggaattagtggacagagctgtaaaccggatcaaagaaattatcaccaatggagtggtaaaagctgccacaggaacaagtccaacttttaatggtgcaacagtaactgtctatcaccagccagcacccatcgctcagttgtctccagctgttagccagaagcctcccttccagtcagggatgcattatgttcaagataaattatttgtgggtctagaacatgctgtacccacttttaatgtcaaggagaaggtggaaggtccaggctgctcctatttgcagcacattcagattgaaacaggtgccaaagtcttcctgcggggcaaaggttcaggctgcattgagccagcatctggccgagaagcttttgaacctatgtatatttacatcagtcaccccaaaccagaaggcctggctgctgccaagaagctttgtgagaatcttttgcaaacagttcatgctgaatactctagatttgtgaatcagattaatactgctgtacctttaccaggctatacacaaccctctgctataagtagtgtccctcctcaaccaccatattatccatccaatggctatcagtctggttaccctgttgttccccctcctcagcagccagttcaacctccctacggagtaccaagcatagtgccaccagctgtttcattagcacctggagtcttgccggcattacctactggagtcccacctgtgccaacacaatacccgataacacaagtgcagcctccagctagcactggacagagtccgatgggtggtccttttattcctgctgctcctgtcaaaactgccttgcctgctggcccccagccccagccccagccccagcccccactcccaagtcagccccaggcacagaagagacgattcacagaggagctaccagatgaacgggaatctggactgcttggataccagcatggacccattcatatgactaatttaggtacaggcttctccagtcagaatgagattgaaggtgcaggatcgaagccagcaagttcctcaggcaaagagagagagagggacaggcagttgatgcctccaccagcctttccagtgactggaataaaaacagagtccgatgaaaggaatgggtctgggaccttaacagggagccatgattatccagccaagaagatgaaaactacagagaagggatttggcttggtggcttatgctgcagattcatctgatgaagaggaggaacatggaggtcataaaaatgcaagtagttttccacagggctggagtttgggataccaatatccttcatcacaaccacgagctaaacaacagatgccattctggatggctccctag

SEQ ID NO: 42 - DNA, 540 bp, Homo sapiens;
atggcagtgtttaagaccactctgtggaggttaatttctgggaccttagggataatatgcctttcgttgatgtctacgttgggaattttgttgaaaaattcttttactaaactgagtattgagccagcatttactccaggacccaacatagaactccagaaagactctgactgctgttcttgccaagaaaaatgggttgggtaccggtgcaactgttacttcatttccagtgaacagaaaacttggaacgaaagtcggcatctctgtgcttctcagaaatccagcctgcttcagcttcaaaacacagatgaactggattttatgagctccagtcaacaattttactggattggactctcttacagtgaggagcacaccgcctggttgtgggagaatggctctgcactctcccagtatctatttccatcatttgaaacttttaatacaaagaactgcatagcgtataatccaaatggaaatgctttagatgaatcctgtgaagataaaaatcgttatatctgtaagcaacagctcatttaa

SEQ ID NO: 43 - DNA, 696 bp, Homo sapiens;
atgcaagatgaagaaagatacatgacattgaatgtacagtcaaagaaaaggagttctgcccaaacatctcaacttacatttaaagattattcagtgacgttgcactggtataaaatcttactgggaatatctggaaccgtgaatggtattctcactttgactttgatctccttgatcctgttggtttctcagggagtattgctaaaatgccaaaaaggaagttgttcaaatgccactcagtatgaggacactggagatctaaaagtgaataatggcacaagaagaaatataagtaataaggacctttgtgcttcgagatctgcagaccagacagtactatgccaatcagaatggctcaaataccaagggaagtgttattggttctctaatgagatgaaaagctggagtgacagttatgtgtattgtttggaaagaaaatctcatctactaatcatacatgaccaacttgaaatggcttttatacagaaaaacctaagacaattaaactacgtatggattgggcttaactttacctccttgaaaatgacatggacttgggtggatggttctccaatagattcaaagatattcttcataaagggaccagctaaagaaaacagctgtgctgccattaaggaaagcaaaattttctctgaaacctgcagcagtgttttcaaatggatttgtcagtattag

SEQ ID NO: 44 - DNA, 1578 bp, Homo sapiens;
atgtgggaggctcagttcctgggcttgctgtttctgcagccgctttgggtggctccagtgaagcctctccagccaggggctgaggtcccggtggtgtgggcccaggagggggctcctgcccagctcccctgcagccccacaatccccctccaggatctcagccttctgcgaagagcaggggtcacttggcagcatcagccagacagtggcccgcccgctgccgcccccggccatcccctggcccccggccctcacccggcggcgccctcctcctgggggcccaggccccgccgctacacggtgctgagcgtgggtcccggaggcctgcgcagcgggaggctgcccctgcagccccgcgtccagctggatgagcgcggccggcagcgcggggacttctcgctatggctgcgcccagcccggcgcgcggacgccggcgagtaccgcgccgcggtgcacctcagggaccgcgccctctcctgccgcctccgtctgcgcctgggccaggcctcgatgactgccagccccccaggatctctcagagcctccgactgggtcattttgaactgctccttcagccgccctgaccgcccagcctctgtgcattggttccggaaccggggccagggccgagtccctgtccgggagtccccccatcaccacttagcggaaagcttcctcttcctgccccaagtcagccccatggactctgggccctggggctgcatcctcacctacagagatggcttcaacgtctccatcatgtataacctcactgttctgggtctggagcccccaactcccttgacagtgtacgctggagcaggttccagggtggggctgccctgccgcctgcctgctggtgtggggacccggtctttcctcactgccaagtggactcctcctgggggaggccctgacctcctggtgactggagacaatggcgactttacccttcgactagaggatgtgagccaggcccaggctgggacctacacctgccatatccatctgcaggaacagcagctcaatgccactgtcacattggcaatcatcacagtgactcccaaatcctttgggtcacctggatccctggggaagctgctttgtgaggtgactccagtatctggacaagaacgctttgtgtggagctctctggacaccccatcccagaggagtttctcaggaccttggctggaggcacaggaggcccagctcctttcccagccttggcaatgccagctgtaccagggggagaggcttcttggagcagcagtgtacttcacagagctgtctagcccaggtgcccaacgctctgggagagccccaggtgccctcccagcaggccacctcctgctgtttctcatccttggtgtcctttctctgctccttttggtgactggagcctttggctttcacctttggagaagacagtggcgaccaagacgattttctgccttagagcaagggattcaccctccgcaggctcagagcaagatagaggagctggagcaagaaccggagccggagccggagccggaaccggagcccgagcccgagcccgagccggagcagctctga

SEQ ID NO: 45 - DNA, 396 bp, Homo sapiens;
atggcaggcatcaaagctttgattagtttgtcctttggaggagcaatcggactgatgtttttgatgcttggatgtgcccttccaatatacaacaaatactggcccctctttgttctatttttttacatcctttcacctattccatactgcatagcaagaagattagtggatgatacagatgctatgagtaacgcttgtaaggaacttgccatctttcttacaacgggcattgtcgtgtcagcttttggactccctattgtatttgccagagcacatctgattgagtggggagcttgtgcacttgttctcacaggaaacacagtcatctttgcaactatactaggctttttcttggtctttggaagcaatgacgacttcagctggcagcagtggtga

SEQ ID NO: 46 - DNA, 2691 bp, Homo sapiens;
atgaattatgtgggacagctggctgggcaggtgattgtcactgtgaaggaactctacaagggcattaaccaggccaccctctctgggtgcattgatgtcatcgtggtacagcagcaggatggcagctatcagtgttcaccttttcacgttcggtttggaaagctgggagtcctgagatccaaagagaaagtgattgatatagaaatcaacggcagtgcagtggatcttcacatgaagttgggtgataacggagaagctttctttgttgaggagactgaagaagaatatgaaaagcttcctgcttaccttgccacctcaccaattcctactgaagatcagttctttaaagatattgacacccctttggtgaaatcgggtggagatgaaacaccatctcagagttcagacatctcacacgtcttggaaacagagacaatttttactccaagttctgtgaaaaagaaaaaacgaaggagaaagaaatacaaacaggacagtaagaaggaagagcaggccgcatctgctgctgcagaagacacatgtgatgtaggcgtgagctccgatgatgacaagggggcccaggcagcacgaggatcttcaaatgcttccttgaaagaagaagaatgtaaagagcctttgctcttccattctggggatcattaccccttatctgatggagattggtcccctttagagaccacctatccccagacagcgtgtcctaagagtgattcagagctggaggtgaaacctgcggagagcctgctcagatcagagtctcacatggagtggacgtggggcggattcccagagtccaccaaggtcagcaaaagagaacgatctgaccatcatcctaggacagctacaattacaccatcagaaaatactcattttcgggtaattcccagtgaggacaacctcatcagtgaagttgagaaggatgcttccatggaagacactgtctgtaccatagtgaagcccaaacccagagccctgggtacacagatgagcgacccaacatctgtggcagagcttctcgaacctcctcttgagagtactcagatttcatctatgttagatgctgaccaccttcccaacgcagccttagcggaggcgccctcagaatccaaaccggcagctaaagtagactcgccgtcaaagaagaaaggtgttcacaaaagaagccaacaccagggacctgatgatatttaccttgatgacttaaagggtctagaacctgaagttgcagctctttatttccctaaaagtgaatcggagcccggttccaggcagtggcccgagtctgacacactctctggctcccagtccccacagtccgtgggaagcgcagctgcagatagcggcaccgagtgcctctcagattctgccatggacttgcctgacgttaccctctccctttgcgggggcctcagtgaaaatggagaaatttcaaaagaaaaattcatggagcatatcattacttatcacgaatttgcagaaaaccctggacttatagacaatcctaaccttgtaataaggatatataatcgttactataactgggctttggcagctcccatgatccttagcttgcaagtattccagaagagcttgcctaaggccacagttgagtcctgggtgaaagacaagatgccaaagaaatctggtcgctggtggttttggcgaaagagagaaagcatgaccaaacagctgccagaatccaaggagggaaaatctgaggcaccgccagccagtgacctgccatccagctccaaggagccggccggtgccaggccggccgagaatgactcctcgagtgacgagggatcacaggagctcgaagaatccatcacagtggaccccatccccacagagcccctgagccacggcagcacaacttcatataagaagtctctccgcctctcctcagaccagatcgcaaaactgaagctccacgatggcccaaatgatgttgtgtttagtattacaacccagtatcaaggcacctgtcgctgtgcagggaccatttacctgtggaactggaatgacaagatcatcatttctgatattgatgggacaataaccaagtcggatgctttgggacagattctcccacagctgggcaaagactggacccaccagggtatagcaaagctctaccattccatcaatgagaatggctacaagtttctgtactgctcggctcgtgccatcggcatggccgacatgacccgtggctacctgcactgggtcaatgacaagggcacaatcttgccccggggccccctgatgctgtcccccagcagcttgttctccgccttccacagagaagtgatagaaaagaaaccagagaagttcaaaattgagtgtctaaatgatatcaagaatctgtttgccccgtctaagcagcccttctatgctgcctttggaaaccgtccaaatgatgtctatgcctacacacaagttggagttccagactgtagaatattcaccgtgaaccccaagggtgaattaatacaagaaagaaccaaaggaaacaagtcatcgtatcacaggctgagtgagctcgtggagcatgtgttcccccttctcagtaaggagcagaattccgcttttccctgcccggagttcagctccttctgctactggcgagacccgatccctgaagtggacctggatgacctgtcttga

SEQ ID NO: 47 - DNA, 1035 bp, Homo sapiens;
atggctgctgccacggagcttaatcgcccgagcagcggtgacaggaacctggagcgaagatgcagacccaacctctcccgagaggtgctctacgaaatctttcgctccctacacaccctggttggacagcttgacctcagagatgatgtggtgaaaattacaatcgattggaacaagctccagagcctctcggcattccagcctgcattgctctttagtgcacttgaacaacacattttatatttacagccttttttagcaaaacttcagtctccgattaaagaggagaatacaactgctgttgaagagataggaagaacagaaatggggaacaaaaatgaagtaaatgacaaattttccattggcgacctacaagaggaagaaaagcacaaagaaagtgatttaagagatgtgaaaaagacacagatccattttgatccagaagtagttcagataaaggctggaaaagcagaaattgacagacgaatatctgcatttattgaaagaaagcaagctgaaatcaatgaaaacaacgtcagggaattttgcaatgttattgattgtaatcaagaaaatagttgtgcaagaactgatgcgatttttaccccttaccccggatttaaaagtcacgtaaaagtttctagagttgtgaatacatacggaccacagactagacctgaaggaattccagggtcaggtcataaacctaacagcatgcttcgagactgtggtaatcaggctgtagaagaacgactacaaaatattgaggcccacttgcggttacagacaggtggtccagtgccaagagacatttatcagagaattaaaaaacttgaggataaaatccttgaattggaaggcatctctcctgaatattttcagtctgtaagcttttctggaaaaagaagaaaagttcaaccacctcaacagaactattcactggctgaacttgatgagaaaattagtgccctcaaacaagccctcctcagaaaatcaagagaagcagaatccatggcaacccaccaccttccatga

SEQ ID NO: 48 - DNA, 3000 bp, Homo sapiens;
atggagccccgggctgccgcggcgggcgagccagagccgccggcggcgtcctcctccttccaggcccggctctggaagaacctgcagctgggggtgggcaggagcaagggcggcgggggcgggcgcgctgggggtccagagcgccgcactgcggacaccccgtcgccctccccgccacccccggtgggcacagggaatgcaccggccagggggagtggtgcaggcagcaggtggagcggcttcaagaagcggaagcaagtgctggaccgagtcttctcctcctcgcagcccaacctgtgctgctcgtcgccggagcccctggagcccggcggcgccggcagagccgagcaggggtccacgctacgccgccggatccgcgagcatttgctccccgccgtaaaggggcccgcggcggcctcgggagcagcgggagggacgcctcctggcggacgctcccccgactcagctccttcctcttcctccgcctcatcctccctgtcctcctcgccccagcctcccccgaggggggaccgcgcccgagatgagggtgcacggcgtcagggccccggggcgcacttgtgccaccagaagagctcctctctgccgggcaccgcctgcctggagcagctgctggagccgccgcctcctcccgcagagccggcgcggagtcccgcggagtctcgggccccggagacgggcgaggagcacggcagcagccagaaaataataaacactgctggaaccagtaatgcagaagtccccttggctgatcccggaatgtaccagctggacattacattaagaaggggtcaaagtttagctgctcgagatcgaggagggacgagtgatccatatgtgaagtttaaaatcggaggaaaagaagtttttagaagtaagataatacacaagaacctcaaccctgtgtgggaagaaaaagcttgtattctggttgatcatcttagggagccattgtatataaaggtatttgactatgattttggactacaggatgactttatgggctcagcctttctggatctgacacaattggagttaaacaggcccacagatgtgacccttactctgaaagatcctcattatcctgaccatgatcttggaatcattttgctctcagtcatccttacccctaaagaaggagagtccagggatgtgacaatgctaatgaggaagagttggaaaagatcaagtaaggaactttcagaaaatgaagtggttggatcttatttctctgtgaagtctctcttttggaggacgtgcggcaggccagctcttcctgtcctgggcttctgcagagcagagcttcagaatccttattgcaaaaatgtacaatttcagacccaaagtttacgcctatcagacctacacagaaaatcgcatctttggagaggaatagtcagcatcaccttgattgaagggagagacctcaaggccatggattccaacgggttgagcgatccctacgtgaagttccggcttgggcatcagaagtacaagagcaagattatgccaaaaacgttgaatcctcagtggagggaacaatttgattttcacctttatgaagaaagaggaggagtcattgatatcactgcatgggacaaagatgctgggaaaagggatgatttcattggcaggtgccaggtcgacctgtcagccctcagtagggaacagacgcacaagctggagttgcagctggaagagggtgagggacacctggtgctgctggtcactctgacagcatcagccacagtcagcatctctgacctgtctgtcaactccctggaggaccagaaggaacgagaggagatattaaagagatatagcccattgaggatatttcacaacctgaaagatgtgggatttctccaggtgaaagtcatcagagcggaagggttaatggctgccgacgtcactggaaaaagtgacccattttgtgtggtagaactgaacaacgatagactgctaacacatactgtctacaaaaatctcaatcctgagtggaataaagtcttcacgttcaacattaaagatatccattcagttcttgaagtgacagtttatgatgaagatcgggatcgaagtgctgactttctgggcaaagttgctataccattgctgtctattcaaaatggtgaacagaaagcctacgtcttgaaaaacaagcagctgacagggccaacaaagggggtcatctatcttgaaatagatgtgatttttaatgctgtgaaagccagcttacgaacattaatacccaaagaacagaagtacattgaagaggaaaacagactctctaaacagctgctactaagaaactttatcagaatgaaacgttgtgtcatggtgctggtaaatgctgcatactacgttaatagttgctttgattgggattcacccccaaggagtctcgctgcttttgtgctctttctctttgttgtctggaactttgagctctacatgataccactggttttgttgttactattgacatggaactacttcttgataatatcagggaaagataacaggcaacgtgatacagtagtggaggacatgctagaggacgaggaagaagaagatgacaaagatgacaaggacagtgaaaaaaagggatttataaataaaatctatgccatccaggaggtatgtgtcagtgtccagaacatcctagatgaagtggcttcctttggcgaaaggataaagaatactttcaactggactgtcccattcttaagctggctggccattgtagccctctgtgtgttcacagccatcctgtactgcattccgctgagatacattgtccttgtctggggcatcaataaatttacaaaaaagcttcggagtccatatgcaattgataacaatgaactacttgacttcctttccagagtcccttcagatgtacaagtggtgcaataccaagaactgaaaccagatccttctcatagcccatataaaagaaagaaaaacaatcttggctag

SEQ ID NO: 49 - DNA, 5574 bp, Homo sapiens;
atggcaagaaagaagctgaaaaaatttactactttggagattgtgctcagtgttcttctgcttgtgttgtttatcatcagtattgttctaattgtgcttttagccaaagagtcactgaaatcaacagccccagatcctgggacaactggtaccccagatcctgggacaactggtaccccagatcctggaacaactggtaccacacatgctaggacaacgggtcccccagatcctggaacaactggtaccactcctgtttctgctgaatgtccagtggtaaatgaattggaacgaattaattgcatccctgaccagccgccaacaaaggccacatgtgaccaacgtggctgttgctggaatccccagggagctgtaagtgttccctggtgctactattccaagaatcatagctaccatgtagagggcaaccttgtcaacacaaatgcaggattcacagcccggttgaaaaatctgccttcttcaccagtgtttggaagcaatgttgacaatgttcttctcacagcagaatatcagacatctaatcgtttccactttaagttgactgaccaaaccaataacaggtttgaagtgccccacgaacacgtgcagtccttcagtggaaatgctgctgcttctttgacctaccaagttgaaatctccagacagccatttagcatcaaagtgaccagaagaagcaacaatcgtgttttgtttgactcgagcattgggcccctactgtttgctgaccagttcttgcagctctccactcgactgcctagcactaacgtgtatggcctgggagagcatgtgcaccagcagtatcggcatgatatgaattggaagacctggcccatatttaacagagacacaactcccaatggaaacggaactaatttgtatggtgcgcagacattcttcttgtgccttgaagatgctagtggattgtcctttggggtgtttctgatgaacagcaatgccatggaggttgtccttcagcctgcgccagccatcacttaccgcaccattgggggcattctcgacttctatgtgttcttgggaaacactccagagcaagttgttcaagaatatctagagctcattgggcggccagcccttccctcctactgggcgcttggatttcacctcagtcgttacgaatatggaaccttagacaacatgagggaagtcgtggagagaaatcgcgcagcacagctcccttatgatgttcagcatgctgatattgattatatggatgagagaagggacttcacttatgattcagtggattttaaaggcttccctgaatttgtcaacgagttacacaataatggacagaagcttgtcatcattgtggatccagccatctccaacaactcttcctcaagtaaaccctatggcccatatgacaggggttcagatatgaagatatgggtgaatagttcagatggagtgactccactcattggggaggtctggcctggacaaactgtgtttcctgattataccaatcccaactgtgctgtttggtggacaaaggaatttgagctttttcacaatcaagtagagtttgatggaatctggattgatatgaatgaagtctccaactttgttgatggttcggtctcaggatgttccacaaacaacctaaataatcccccattcactcccagaatcctggatgggtacctgttctgcaagactctctgtatggatgcagtgcagcactggggcaagcagtatgacattcacaatctgtatggctactccatggcggtcgccacagcagaagctgccaagactgtgttccctaataagagaagcttcattctgacccgttctacctttgcgggctctggcaagtttgcagcacattggttaggagacaacactgccacctgggatgacctgagatggtccatccctggcgtgcttgagttcaacctttttggcatcccaatggtgggtcctgacatatgtggctttgctttggacacccctgaggagctctgtaggcggtggatgcagttgggtgcattttatccgttttctagaaatcacaatggccaaggctacaaggaccaggatcctgcctcctttggagctgactccctgctgttgaattcctccaggcactaccttaacatccgctatactctattgccctacctatacaccctcttcttccgtgctcacagccgaggggacacggtggccaggccccttttgcatgagttctacgaggacaacagcacttgggatgtgcaccaacagttcttatgggggcccggcctcctcatcactccagttctggatgaaggtgcagagaaagtgatggcatatgtgcctgatgctgtctggtatgactacgagactgggagccaagtgagatggaggaagcaaaaagtcgagatggaacttcctggagacaaaattggacttcaccttcgaggaggctacatcttccccacacagcagccaaatacaaccactctggccagtcgaaagaaccctcttggtcttatcattgccctagatgagaacaaagaagcaaaaggagaacttttctgggataatggggaaacgaaggatactgtggccaataaagtgtatcttttatgtgagttttctgtcactcaaaaccgcttggaggtgaatatttcacaatcaacctacaaggaccccaataatttagcatttaatgagattaaaattcttgggacggaggaacctagcaatgttacagtgaaacacaatggtgtcccaagtcagacttctcctacagtcacttatgattctaacctgaaggttgccattatcacagatattgatcttctcctgggagaagcatacacagtggaatggagcataaagataagggatgaagaaaaaatagactgttaccctgatgagaatggtgcttctgccgaaaactgcactgcccgtggctgtatctgggaggcatccaattcttctggagtccctttttgctattttgtcaacgacctatactctgtcagtgatgttcagtataattcccatggggccacagctgacatctccttaaagtcttccgtttatgccaatgccttcccctccacacccgtgaacccccttcgcctggatgtcacttaccataagaatgaaatgctgcagttcaagatttatgatcccaacaagaatcggtatgaagttccagtccctctgaacatacccagcatgccatccagcacccctgagggtcaactctatgatgtgctcattaagaagaatccatttgggattgaaattcgccggaagagtacaggcactataatttgggactctcagctccttggctttaccttcagtgacatgtttatccgcatctccacccgccttccctccaagtacctctatggctttggggaaactgagcacaggtcctataggagagacttggagtggcacacttgggggatgttctcccgagaccagcccccagggtacaagaagaattcctatggtgtccacccctactacatggggctggaggaggacggcagtgcccatggagtgctcctgctgaacagcaatgccatggatgtgacgttccagcccctgcctgccttgacataccgcaccacagggggagttctggacttttatgtgttcttggggccgactccagagcttgtcacccagcagtacactgagttgattggccggcctgtgatggtaccttactggtctttggggttccagctgtgtcgctatggctaccagaatgactctgagatcgccagcttgtatgatgagatggtggctgcccagatcccttatgatgtgcagtactcagacatcgactacatggagcggcagctggacttcaccctcagccccaagtttgctgggtttccagctctgatcaatcgcatgaaggctgatgggatgcgggtcatcctcattctggatccagccatttctggcaatgagacacagccttatcctgccttcactcggggcgtggaggatgacgtcttcatcaaatacccaaatgatggagacattgtctggggaaaggtctggcctgattttcctgatgttgttgtgaatgggtctctagactgggacagccaagtggagctatatcgagcttatgtggccttcccagactttttccgtaattcaactgccaagtggtggaagagggaaatagaagaactatacaacaatccacagaatccagagaggagcttgaagtttgatggcatgtggattgatatgaatgaaccatcaagcttcgtgaatggggcagtttctccaggctgcagggacgcctctctgaaccaccctccctacatgccacatttggagtccagggacaggggcctgagcagcaagaccctttgtatggagagtcagcagatcctcccagacggctccctggtgcagcactacaacgtgcacaacctgtatgggtggtcccagaccagacccacatacgaagccgtgcaggaggtgacgggacagcgaggggtcgtcatcacccgctccacatttccctcttctggccgctgggcaggacattggctgggagacaacacggccgcatgggatcagctgaagaagtctatcattggcatgatggagttcagcctcttcggcatatcctatacgggagcagatatctgtgggttctttcaagatgctgaatatgagatgtgtgttcgctggatgcagctgggggccttttaccccttctcaagaaaccacaacaccattgggaccaggagacaagaccctgtgtcctgggatgttgcttttgtgaatatttccagaactgtcctgcagaccagatacaccctgttgccatatctgtataccttgatgcataaggcccacacggagggcgtcactgttgtgcggcctctgctccatgagtttgtgtcagaccaggtgacatgggacatagacagtcagttcctgctgggcccagccttcctggtcagccctgtcctggagcgtaatgccagaaatgtcactgcatatttccctagagcccgctggtatgattactacacgggtgtggatattaatgcaagaggagagtggaagaccttgccagcccctcttgaccacattaatcttcatgtccgtgggggctacatcctgccctggcaagagcctgcactgaacacccacttaagccgccagaaattcatgggcttcaaaattgccttggatgatgaaggaactgctgggggctggctcttctgggatgatgggcaaagcattgatacctatgggaaaggactctattacttggccagcttttctgccagccagaatacgatgcaaagccatataattttcaacaattacatcactggtacaaatcctttgaaactgggctacattgaaatctggggagtgggcagtgtccccgttaccagtgtcagcatctctgtgagtggcatggtcataacaccctccttcaacaatgaccccacgacacaggtattaagcatcgatgtgactgacagaaacatcagcctacataattttacttcattgacgtggataagcactctgtga

SEQ ID NO: 50 - DNA, 2253 bp, Homo sapiens;
atgggcaagtcagaaagtcagatggatataactgatatcaacactccaaagccaaagaagaaacagcgatggactccactggagatcagcctctcggtccttgtcctgctcctcaccatcatagctgtgacaatgatcgcactctatgcaacctacgatgatggtatttgcaagtcatcagactgcataaaatcagctgctcgactgatccaaaacatggatgccaccactgagccttgtacagactttttcaaatatgcttgcggaggctggttgaaacgtaatgtcattcccgagaccagctcccgttacggcaactttgacattttaagagatgaactagaagtcgttttgaaagatgtccttcaagaacccaaaactgaagatatagtagcagtgcagaaagcaaaagcattgtacaggtcttgtataaatgaatctgctattgatagcagaggtggagaacctctactcaaactgttaccagacatatatgggtggccagtagcaacagaaaactgggagcaaaaatatggtgcttcttggacagctgaaaaagctattgcacaactgaattctaaatatgggaaaaaagtccttattaatttgtttgttggcactgatgataagaattctgtgaatcatgtaattcatattgaccaacctcgacttggcctcccttctagagattactatgaatgcactggaatctataaagaggcttgtacagcatatgtggattttatgatttctgtggccagattgattcgtcaggaagaaagattgcccatcgatgaaaaccagcttgctttggaaatgaataaagttatggaattggaaaaagaaattgccaatgctacggctaaacctgaagatcgaaatgatccaatgcttctgtataacaagatgacattggcccagatccaaaataacttttcactagagatcaatgggaagccattcagctggttgaatttcacaaatgaaatcatgtcaactgtgaatattagtattacaaatgaggaagatgtggttgtttatgctccagaatatttaaccaaacttaagcccattcttaccaaatattctgccagagatcttcaaaatttaatgtcctggagattcataatggatcttgtaagcagcctcagccgaacctacaaggagtccagaaatgctttccgcaaggccctttatggtacaacctcagaaacagcaacttggagacgttgtgcaaactatgtcaatgggaatatggaaaatgctgtggggaggctttatgtggaagcagcatttgctggagagagtaaacatgtggtcgaggatttgattgcacagatccgagaagtttttattcagactttagatgacctcacttggatggatgccgagacaaaaaagagagctgaagaaaaggccttagcaattaaagaaaggatcggctatcctgatgacattgtttcaaatgataacaaactgaataatgagtacctcgagttgaactacaaagaagatgaatacttcgagaacataattcaaaatttgaaattcagccaaagtaaacaactgaagaagctccgagaaaaggtggacaaagatgagtggataagtggagcagctgtagtcaatgcattttactcttcaggaagaaatcagatagtcttcccagccggcattctgcagccccccttctttagtgcccagcagtccaactcattgaactatgggggcatcggcatggtcataggacacgaaatcacccatggcttcgatgacaatggcagaaactttaacaaagatggagacctcgttgactggtggactcaacagtctgcaagtaactttaaggagcaatcccagtgcatggtgtatcagtatggaaacttttcctgggacctggcaggtggacagcaccttaatggaattaatacactgggagaaaacattgctgataatggaggtcttggtcaagcatacagagcctatcagaattatattaaaaagaatggcgaagaaaaattacttcctggacttgacctaaatcacaaacaactatttttcttgaactttgcacaggtgtggtgtggaacctataggccagagtatgcggttaactccattaaaacagatgtgcacagtccaggcaatttcaggattattgggactttgcagaactctgcagagttttcagaagcctttcactgccgcaagaattcatacatgaatccagaaaagaagtgccgggtttggtga

SEQ ID NO: 51 - DNA, 6192 bp, Homo sapiens;
atggttttggatgaccttccaaacttagaagacatctatacttccttgtgttcatcaacaatggaagactcagagatggattttgactctggactagaagatgatgacacaaaaagtgatagtattttggaggattccacaatttttgtggccttcaaaggaaatatagatgataaagacttcaaatggaaattagatgcaatattgaaaaacgtgcccaatttgttacacatggagtccagcaagctaaaagtacagaaggtggagccctggaacagcgtgcgtgtgacattcaacatcccccgggaagcagcggagcggctacggatccttgctcagagcaacaaccagcagcttcgggatttagggattctctccgttcagattgaaggggaaggtgctattaacctggctttggctcagaaccgaagccaagatgtgagaatgaatggacccatgggagctggaaattcagttaggatggaggcgggatttcctatggcaagtggtccaggaataataaggatgaacaaccctgccactgttatgatacccccgggtggaaatgtgtcatcttccatgatggcaccaggccccaatccagagctgcagcccaggactcctcgccctgcttctcagtcagatgcaatggatccactcctctctgggctccatatacagcagcaaagtcatccctcaggatctttagctcccccacatcacccaatgcagcctgtctctgtgaacagacaaatgaacccagctaattttccccagctgcagcagcagcagcaacaacaacaacagcagcagcagcagcagcagcagcaacaacagcaacagcagcaacaacagttgcaggcaagacccccacagcaacatcagcagcaacagccacagggaattcgaccccagtttactgccccaactcaggtgcctgttcctccaggctggaaccagctgccttctggagcccttcaacctcctccagcccagggttctctgggcacaatgactgcaaaccaagggtggaagaaggctcccttgcccggcccaatgcaacagcaactccaggcaagaccatccttagccacggtacagacgccttcccaccctccccctccatatccctttggcagccagcaagcctcacaagcccacacaaactttcctcagatgagcaacccaggccagttcacagctcctcagatgaagagtttgcagggagggccctctagggtcccaactcccttgcagcagccccacctcaccaacaagtctcctgcctcctcaccctcctccttccagcagggatcccctgcatcctccccaacggttaaccaaactcagcagcagatgggaccaaggccacctcaaaataacccacttccccagggatttcagcagcctgtcagctctccgggtcggaatcctatggttcaacagggaaatgtgccacctaacttcatggtgatgcagcagcaaccaccaaaccaggggccacagagtttacatccaggcctaggaggaatgcctaaacgcctcccacctggcttctcagcaggacaggccaatccgaactttatgcaaggtcaggtgccttcgaccacagcaaccacccctgggaattcaggagcccctcagctgcaagcaaatcaaaatgtccagcatgcaggtggtcaaggagctggtcctcctcaaaaccagatgcaggtgtcccacgggccgccaaatatgatgcagcccagcctcatgggaattcatggcaacatgaacaatcagcaggctggtacttctggggttcctcaagtgaacctcagcaacatgcaaggccagccccagcagggcccaccatctcagctgatgggcatgcaccagcaaatcgtgccctcccagggccagatggtccagcaacaaggaaccttgaaccctcagaaccctatgatcctttcaagggcccagcttatgccacagggccagatgatggtgaaccccccgagccaaaatcttgggccctcgccccaaaggatgaccccacccaagcagatgctttcccagcagggcccacaaatgatggcgccacataaccagatgatggggcctcaggggcaggttttgctccaacagaacccaatgatagagcagattatgaccaatcaaatgcaggggaataagcagcagtttaacactcagaaccagtccaatgtcatgccgggaccagcccagataatgaggggaccaactccaaacatgcaaggaaatatggtgcagtttacgggacagatgtcaggacagatgctgccccagcaagggcctgtgaacaacagtccatctcaggttatgggcattcagggacaggtcctgcggccaccagggcccagcccacacatggcccagcagcatggtgatcctgctactacagcaaataacgatgtcagtttatctcagatgatgcctgatgttagcattcaacaaaccaacatggtcccccctcatgtgcaggccatgcagggaaacagtgcctcgggaaaccacttctcaggccatgggatgtctttcaatgcacctttcagtggagctcccaatggaaatcagatgtcctgtggtcaaaatccaggcttcccagtcaataaggatgtcacgctaacgagcccattgttggtcaacttattgcagagtgacatatctgcaggccattttggggtaaacaataagcaaaataataccaacgcaaataaaccgaagaagaagaaaccccctcggaagaagaaaaatagtcagcaagatctaaacaccccagatactcgcccagctggtctggaagaggctgatcagccaccgttgcctggagaacaaggaattaacttggataactcaggccctaaactgccagaattttcaaaccggccaccaggttatccttctcaaccagttgaacagaggccacttcagcagatgcctcctcaactcatgcagcatgtggcacccccaccacagccaccacagcagcagccacagccacaactgcctcagcagcagcagccaccacctcccagtcagccacagtctcagcagcagcagcagcagcagcaacaaatgatgatgatgctcatgatgcagcaggatcccaaatcagttaggcttccagtctctcaaaatgtccatcctccaaggggccccctgaaccccgactcccagagaatgcccatgcaacagagtggcagtgtgcctgtcatggtcagtctgcaaggacctgcctccgtgccaccatcacctgataaacaaagaatgccaatgcctgtgaatactcccttgggaagcaattcaaggaaaatggtctatcaggagagcccgcagaatccttccagctcgccactggcggagatggcctcactccctgaagcaagtggcagtgaagcaccatctgtcccaggaggcccaaacaacatgccttcacatgtagtacttccccagaatcagttaatgatgacagggccaaaacctggaccatcgcccctttcagcaactcaaggtgcaactccccagcaaccccctgtaaattccctgcccagctctcacggccaccacttcccaaatgtggctgcgccaacccagacatctaggcccaaaacaccaaacagagccagccccagaccctattatcctcagacacccaacaaccgccctcccagcacagaaccttcagaaatcagtctgtcaccagaaagactcaatgcctccatagcaggactcttccctccacagattaatattcctttacctcctaggccaaatttaaacaggggctttgatcaacaaggcctaaatccaacaactttgaaggccatcgggcaagcaccttcaaatcttaccatgaatccttccaattttgctaccccacaaactcacaaattagattctgtggtagtgaattctggaaagcagtctaattctggagcaacaaaacgggcaagtccaagcaacagtcgcaggtctagtcctgggtccagtaggaaaaccactccaagccctgggaggcaaaattcaaaagcccctaaacttactctggcctctcagacaaatgcagccctattgcagaatgtggagttgccgagaaatgtattggtcagtcccactcctctggccaatccccctgtacctgggagctttcctaacaacagtgggctgaatcctcagaattctactgtgtctgtggctgcagttgggggtgttgttgaggataacaaggagagcttgaatgtgcctcaggacagtgattgccagaattcccagagtaggaaggaacaggtaaacattgaactaaaagcagtccctgcccaagaagttaaaatggttgtccctgaagatcagtccaaaaaggatgggcagccttcggatcctaacaaacttcccagtgtcgaagagaacaaaaatttggtgtctcctgctatgagggaagcaccaacatcgttaagtcaacttcttgacaactctggagctcccaatgtgacaattaaaccccctgggcttacagatctggaagtaacacctccagtagtttctggggaggacctcaaaaaagcatctgtcattcccacactgcaggatctgtcttcttctaaagaaccttctaattccctaaacttacctcacagtaatgagctgtgttcatcccttgtgcatcccgaattgagtgaggtcagttctaacgttgcaccaagcatccctccagtaatgtcaagacctgttagctcttcctccatttccactcccttgcccccaaatcaaataactgtatttgtcacttccaatcccatcacaacttcagctaacacatcagcagctttgccaactcacttgcagtctgcattgatgtcaacagttgtcacaatgcccaatgcgggtagcaaggttatggtttctgagggacagtcagctgctcagtctaatgcccggcctcagttcattacacctgtctttatcaattcatcctcaataattcaggttatgaaaggatcacagccaagcacaattcctgcagccccactgacaaccaactctggcctgatgcctccctctgttgcagttgttggccctttacacatacctcagaacataaaattttcttctgctcctgtaccgcctaatgccctctccagtagtcctgctccaaacatccagacaggtcgacctttggtccttagctcacgagccacccctgttcagcttccttcccctccttgtacgtcttctccagttgtcccttctcatccccctgtgcagcaagtgaaagaattgaatccagatgaggctagccctcaggtgaacacctcagcagatcagaacactcttccctcttcacagtcaaccacaatggtttctccccttttgaccaatagtccagggtcctctggcaaccggcgaagcccagtctcgtctagtaagggcaaaggaaaagtggacaaaattggccaaattttgttgaccaaggcatgtaagaaagttacaggctctcttgagaaaggggaagaacaatatggtgcagatggagagactgaaggccaagggctagacaccacagctccggggctcatgggaacagagcagttatccacagagctggacagtaaaaccccaacgcccccagcacccactctgctaaaaatgacctctagccctgtgggcccgggcactgcctcagcaggacccagcttacctggcggtgctctccccaccagtgtacgctcgatagtaaccactctggtaccctccgagctcatctccgccgtaccgaccacaaaaagcaatcatggtggcatagcatctgagtcacttgcgggtggcctagtggaggagaaggtgggatcccatccagaacttctacccagcatagccccgtcgcagaatttagtctcaaaggaaacttcaaccacagcactgcaggcctctgttgccagaccagagctggaggtaaatgctgccatagtctctggacaaagcagtgagcccaaagagatagttgaaaagtccaaaatcccaggccgaagaaactcccgaactgaagagccaactgtggcctctgaaagtgtggaaaatggacatcgtaaacgatcttctcgacctgcttcagcctccagctctactaaagacataaccagtgcggtgcaatccaagcgaagaaaatccaagtaa

SEQ ID NO: 52 - DNA, 1287 bp, Homo sapiens;
atgtattcgtccccgctctgcctcacccaggatgagttccacccgttcatcgaggccctgctgcctcacgtccgcgccttcgcctacacctggttcaacctgcaggcgcggaagcgcaagtacttcaagaagcacgagaagcggatgtcgaaggacgaggagcgtgcggtcaaggacgagctgctgggcgagaagcccgaggtcaagcagaagtgggcgtcgcggctgctggccaagctgcgcaaggacatccggcccgagtgccgcgaggacttcgtgctgagcatcaccggcaagaaggcgccgggctgcgtgctctccaaccccgaccagaagggcaagatgcggcgcatcgactgtctccggcaggcggacaaggtgtggcggctggacctggtcatggtcatcctgttcaagggcatcccgctggagagcaccgacggcgagcgcctggtcaaggctgcgcagtgcggtcacccggtcctgtgcgtgcagccgcaccacattggcgtggccgtcaaggagctggacctctacctggcctacttcgtgcgtgagcgagatgcagagcaaagcggcagtccccggacagggatgggctctgaccaggaggacagcaagcccatcacgctggacacgaccgacttccaggagagctttgtcacctccggcgtgttcagcgtcactgagctcatccaagtgtcccggacacccgtggtgactggaacaggacccaacttctccctgggggagctgcaggggcacctggcatacgacctgaacccagccagcactggcctcagaagaacgctgcccagcacctcctccagtgggagcaagcggcacaaatcgggctcgatggaggaagacgtggacacgagccctggcggcgattactacacttcgcccagctcgcccacgagtagcagccgcaactggacggaggacatggaaggaggcatctcgtccccggtgaagaagacagagatggacaagtcaccattcaacagcccgtccccccaggactctccccgcctctccagcttcacccagcaccaccggcccgtcatcgccgtgcacagcgggatcgcccggagcccacacccgtcctccgctctgcatttccctacgacgtccatcctaccccagacggcctccacctacttcccccacacggccatccgctacccacctcatctcaacccccaggacccgctcaaagatcttgtctcgctggcctgcgacccagccagccagcaacctggaccgtcctggtatctgggatag

SEQ ID NO: 53 - DNA, 4290 bp, Homo sapiens;
atggctggcggagcctggggccgcctggcctgttacttggagttcctgaagaaggaggagctgaaggagttccagcttctgctcgccaataaagcgcactccaggagctcttcgggtgagacacccgctcagccagagaagacgagtggcatggaggtggcctcgtacctggtggctcagtatggggagcagcgggcctgggacctagccctccatacctgggagcagatggggctgaggtcactgtgcgcccaagcccaggaaggggcaggccactctccctcattcccctacagcccaagtgaaccccacctggggtctcccagccaacccacctccaccgcagtgctaatgccctggatccatgaattgccggcggggtgcacccagggctcagagagaagggttttgagacagctgcctgacacatctggacgccgctggagagaaatctctgcctcactcctctaccaagctcttccaagctccccagaccatgagtctccaagccaggagtcacccaacgcccccacatccacagcagtgctggggagctggggatccccacctcagcccagcctagcacccagagagcaggaggctcctgggacccaatggcctctggatgaaacgtcaggaatttactacacagaaatcagagaaagagagagagagaaatcagagaaaggcaggcccccatgggcagcggtggtaggaacgcccccacaggcgcacaccagcctacagccccaccaccacccatgggagccttctgtgagagagagcctctgttccacatggccctggaaaaatgaggattttaaccaaaaattcacacagctgctacttctacaaagacctcaccccagaagccaagatcccctggtcaagagaagctggcctgattatgtggaggagaatcgaggacatttaattgagatcagagacttatttggcccaggcctggatacccaagaacctcgcatagtcatactgcagggggctgctggaattgggaagtcaacactggccaggcaggtgaaggaagcctgggggagaggccagctgtatggggaccgcttccagcatgtcttctacttcagctgcagagagctggcccagtccaaggtggtgagtctcgctgagctcatcggaaaagatgggacagccactccggctcccattagacagatcctgtctaggccagagcggctgctcttcatcctcgatggtgtagatgagccaggatgggtcttgcaggagccgagttctgagctctgtctgcactggagccagccacagccggcggatgcactgctgggcagtttgctggggaaaactatacttcccgaggcatccttcctgatcacggctcggaccacagctctgcagaacctcattccttctttggagcaggcacgttgggtagaggtcctggggttctctgagtccagcaggaaggaatatttctacagatatttcacagatgaaaggcaagcaattagagcctttaggttggtcaaatcaaacaaagagctctgggccctgtgtcttgtgccctgggtgtcctggctggcctgcacttgcctgatgcagcagatgaagcggaaggaaaaactcacactgacttccaagaccaccacaaccctctgtctacattaccttgcccaggctctccaagctcagccattgggaccccagctcagagacctctgctctctggctgctgagggcatctggcaaaaaaagacccttttcagtccagatgacctcaggaagcatgggttagatggggccatcatctccaccttcttgaagatgggtattcttcaagagcaccccatccctctgagctacagcttcattcacctctgtttccaagagttctttgcagcaatgtcctatgtcttggaggatgagaaggggagaggtaaacattctaattgcatcatagatttggaaaagacgctagaagcatatggaatacatggcctgtttggggcatcaaccacacgtttcctattgggcctgttaagtgatgagggggagagagagatggagaacatctttcactgccggctgtctcaggggaggaacctgatgcagtgggtcccgtccctgcagctgctgctgcagccacactctctggagtccctccactgcttgtacgagactcggaacaaaacgttcctgacacaagtgatggcccatttcgaagaaatgggcatgtgtgtagaaacagacatggagctcttagtgtgcactttctgcattaaattcagccgccacgtgaagaagcttcagctgattgagggcaggcagcacagatcaacatggagccccaccatggtagtcctgttcaggtgggtcccagtcacagatgcctattggcagattctcttctccgtcctcaaggtcaccagaaacctgaaggagctggacctaagtggaaactcgctgagccactctgcagtgaagagtctttgtaagaccctgagacgccctcgctgcctcctggagaccctgcggttggctggctgtggcctcacagctgaggactgcaaggaccttgcctttgggctgagagccaaccagaccctgaccgagctggacctgagcttcaatgtgctcacggatgctggagccaaacacctttgccagagactgagacagccgagctgcaagctacagcgactgcagctggtcagctgtggcctcacgtctgactgctgccaggacctggcctctgtgcttagtgccagccccagcctgaaggagctagacctgcagcagaacaacctggatgacgttggcgtgcgactgctctgtgaggggctcaggcatcctgcctgcaaactcatacgcctggggctggaccagacaactctgagtgatgagatgaggcaggaactgagggccctggagcaggagaaacctcagctgctcatcttcagcagacggaaaccaagtgtgatgacccctactgagggcctggatacgggagagatgagtaatagcacatcctcactcaagcggcagagactcggatcagagagggcggcttcccatgttgctcaggctaatctcaaactcctggacgtgagcaagatcttcccaattgctgagattgcagaggaaagctccccagaggtagtaccggtggaactcttgtgcgtgccttctcctgcctctcaaggggacctgcatacgaagcctttggggactgacgatgacttctggggccccacggggcctgtggctactgaggtagttgacaaagaaaagaacttgtaccgagttcacttccctgtagctggctcctaccgctggcccaacacgggtctctgctttgtgatgagagaagcggtgaccgttgagattgaattctgtgtgtgggaccagttcctgggtgagatcaacccacagcacagctggatggtggcagggcctctgctggacatcaaggctgagcctggagctgtggaagctgtgcacctccctcactttgtggctctccaagggggccatgtggacacatccctgttccaaatggcccactttaaagaggaggggatgctcctggagaagccagccagggtggagctgcatcacatagttctggaaaaccccagcttctcccccttgggagtcctcctgaaaatgatccataatgccctgcgcttcattcccgtcacctctgtggtgttgctttaccaccgcgtccatcctgaggaagtcaccttccacctctacctgatcccaagtgactgctccattcggaaggaactggagctctgctatcgaagccctggagaagaccagctgttctcggagttctacgttggccacttgggatcagggatcaggctgcaagtgaaagacaagaaagatgagactctggtgtgggaggccttggtgaaaccaggagatctcatgcctgcaactactctgatccctccagcccgcatagccgtaccttcacctctggatgccccgcagttgctgcactttgtggaccagtatcgagagcagctgatagcccgagtgacatcggtggaggttgtcttggacaaactgcatggacaggtgctgagccaggagcagtacgagagggtgctggctgagaacacgaggcccagccagatgcggaagctgttcagcttgagccagtcctgggaccggaagtgcaaagatggactctaccaagccctgaaggagacccatcctcacctcattatggaactctgggagaagggcagcaaaaagggactcctgccactcagcagctga

SEQ ID NO: 54 - DNA, 1281 bp, Homo sapiens;
atgactcctctctgcctcaattgctctgtcctccctggagacctgtacccagggggtgcaaggaaccccatggcttgcaatggcagtgcggccagggggcactttgaccctgaggacttgaacctgactgacgaggcactgagactcaagtacctggggccccagcagacagagctgttcatgcccatctgtgccacatacctgctgatcttcgtggtgggcgctgtgggcaatgggctgacctgtctggtcatcctgcgccacaaggccatgcgcacgcctaccaactactacctcttcagcctggccgtgtcggacctgctggtgctgctggtgggcctgcccctggagctctatgagatgtggcacaactaccccttcctgctgggcgttggtggctgctatttccgcacgctactgtttgagatggtctgcctggcctcagtgctcaacgtcactgccctgagcgtggaacgctatgtggccgtggtgcacccactccaggccaggtccatggtgacgcgggcccatgtgcgccgagtgcttggggccgtctggggtcttgccatgctctgctccctgcccaacaccagcctgcacggcatccggcagctgcacgtgccctgccggggcccagtgccagactcagctgtttgcatgctggtccgcccacgggccctctacaacatggtagtgcagaccaccgcgctgctcttcttctgcctgcccatggccatcatgagcgtgctctacctgctcattgggctgcgactgcggcgggagaggctgctgctcatgcaggaggccaagggcaggggctctgcagcagccaggtccagatacacctgcaggctccagcagcacgatcggggccggagacaagtgaccaagatgctgtttgtcctggtcgtggtgtttggcatctgctgggccccgttccacgccgaccgcgtcatgtggagcgtcgtgtcacagtggacagatggcctgcacctggccttccagcacgtgcacgtcatctccggcatcttcttctacctgggctcggcggccaaccccgtgctctatagcctcatgtccagccgcttccgagagaccttccaggaggccctgtgcctcggggcctgctgccatcgcctcagaccccgccacagctcccacagcctcagcaggatgaccacaggcagcaccctgtgtgatgtgggctccctgggcagctgggtccaccccctggctgggaacgatggcccagaggcgcagcaagagaccgatccatcctga

SEQ ID NO: 55 - DNA, 1074 bp, Homo sapiens;
atgcagagtgtgcagagcacgagcttttgtctccgaaagcagtgcctttgcctgaccttcctgcttctccatctcctgggacaggtcgctgcgactcagcgctgccctccccagtgcccgggccggtgccctgcgacgccgccgacctgcgcccccggggtgcgcgcggtgctggacggctgctcatgctgtctggtgtgtgcccgccagcgtggcgagagctgctcagatctggagccatgcgacgagagcagtggcctctactgtgatcgcagcgcggaccccagcaaccagactggcatctgcacggcggtagagggagataactgtgtgttcgatggggtcatctaccgcagtggagagaaatttcagccaagctgcaaattccagtgcacctgcagagatgggcagattggctgtgtgccccgctgtcagctggatgtgctactgcctgagcctaactgcccagctccaagaaaagttgaggtgcctggagagtgctgtgaaaagtggatctgtggcccagatgaggaggattcactgggaggccttacccttgcagcttacaggccagaagccaccctaggagtagaagtctctgactcaagtgtcaactgcattgaacagaccacagagtggacagcatgctccaagagctgtggtatggggttctccacccgggtcaccaataggaaccgtcaatgtgagatgctgaaacagactcggctctgcatggtgcggccctgtgaacaagagccagagcagccaacagataagaaaggaaaaaagtgtctccgcaccaagaagtcactcaaagccatccacctgcagttcaagaactgcaccagcctgcacacctacaagcccaggttctgtggggtctgcagtgatggccgctgctgcactccccacaataccaaaaccatccaggcagagtttcagtgctccccagggcaaatagtcaagaagccagtgatggtcattgggacctgcacctgtcacaccaactgtcctaagaacaatgaggccttcctccaggagctggagctgaagactaccagagggaaaatgtaa

SEQ ID NO: 56 - DNA, 4284 bp, Homo sapiens;
atgttgttaccctcggacgtagcccggcttgtattgggttacttacagcaagaaaacctcatttctacctgccagacttttattttggaaagttcagatttaaaagaatatgcagaacattgtacagatgaagggtttattccagcctgcttactgtccttatttggaaaaaacttgacaacaattttaaatgagtatgtagctatgaaaacaaaagaaacatcaaataatgtcccagcaataatgtcatctctatggaagaaattggaccatacactttctcagatcaggagcatgcaaagttccccaaggtttgctggcagtcagagagcccgaacgagaactggaattgcagaaatcaaacggcagagaaagcttgcatctcaaacagctccagccagtgcagagttgctcactttaccttacctttcaggacagtttaccactcctccttccacaggtacacaggttactcgaccaagtggccaaatttcagatccatcgaggtcatattttgtagtggtcaaccactcacagtcacaagatactgtaaccactggagaagctttaaatgtcattcctggtgctcaggaaaagaaagcacatgccagtttaatgtctcccggtagacgcaaaagtgaatctcagagaaaaagtaccactttgtctggccctcattcaacaatacggaatttccaagatccaaacgcttttgcagtagaaaaacaaatggttattgaaaatgcacgagaaaaaatactaagcaacaaatctcttcaagaaaagctagcagaaaacataaataaatttttaactagtgataacaatattgcccaagtacctaagcaaacagataacaaccctacggagccagagacttcaattgatgaattcctaggacttccgagtgaaattcacatgtctgaagaagctatacaggacatattggaacagacagaatcagacccagcatttcaggcactctttgatctctttgactatggcaaaacaaagaataataaaaatatatcacaaagtatttccagtcaacctatggaatccaatcccagtatagtcttagcagatgaaactaatctagcagttaaaggttcttttgaaacagaagaatctgatggtcagtctggtcagcccgctttttgtacatcctatcagaatgatgacccattaaatgctttgaagaatagcaacaaccatgatgtgcttagacaagaagaccaggaaaatttttcccaaataagtaccagcatacagaaaaaggcctttaaaacagctgtacccactgaacagaagtgtgacattgacattacctttgagtccgtgcctaatttgaatgactttaaccaaagagggaattctaatgctgaatgtaatccacattgtgctgaattatacaccaatcagatgtccactgaaactgaaatggctatagggattgaaaagaactctttgtcttcaaatgtaccgagtgaatctcagttacagcctgatcagcctgatataccaataacttcatttgtttcacttggttgtgaagctaacaatgaaaacttaattctctctgggaagagttctcaacttttatcccaagatacttcattaactggaaagccatctaaaaaaagtcaattttgtgaaaattctaatgatacagtaaaacttaaaattaattttcatggttccaagtcatcagattctagtgaagttcacaagagtaaaatagaaattaatgtgttagaaccagttatgtcacagctatcaaattgccaagataattcttgtcttcaaagtgaaatactacctgtgtctgttgaaagttcacatttaaatgtatctggacaagtagaaattcatcttggagattcgctgtcttctactaaacaaccatctaatgattcagcatctgttgagttaaatcatacagaaaatgaagctcaggcatccaagtctgagaattcacaggagccttcatcttctgtaaaagaagagaatactatttttctctctttaggtggaaatgctaactgtgagaaagttgcactgacgcctccagaaggcactcctgtagaaaacagtcactctcttcctccagaatctgtgtgttcttcagtgggagattctcaccctgagtcccaaaatactgatgataaaccttctagcaacaactcagcagagatagatgcatcaaatatcgtctctctcaaagttatcattagtgatgatccatttgtttcctcagatactgaacttaccagtgctgtttctagtattaatggagaaaacctgccaactataatcttgtcttctcctactaaatcacctactaaaaatgcagaactagttaaatgcctatcttcagaagaaactgtaggtgctgttgtatatgccgaagtaggggattcagcctcaatggaacagagtcttttaacattcaaatctgaagactctgcagtaaacaatactcagaatgaagatggcattgctttttcagctaatgttacaccatgtgtttccaaggatggaggatatatacagttgatgccagccacaagcacagcttttggcaattcaaataacattctgatagctacctgtgtgactgatccaacagcgttaggaacatctgtaagtcagtctaatgtagtggtgttgcctggaaattctgcacctatgactgctcaacctctaccacctcagttacagacaccaccaaggtcaaacagtgtatttgctgtcaaccaagctgtgtcaccaaacttttcacaaggatctgccataataattgcctctccagtccagcctgtactccaaggaatggtagggatgatcccagtatctgtggttggacagaatggaaataacttttctactcctcctcggcaggttcttcatatgcctttgacagcacctgtatgcaatagaagtatccctcaattccccgtccctccaaaatctcagaaggctcagggactaagaaacaagccttgtataggaaaacaagtaaataatttggtggattcgtcaggtcattcagttggatgtcatgcacaaaaaactgaagtttctgacaaaagtattgccacagatcttgggaaaaaatcagaagaaaccacagttcccttcccagaagagagtatagttccagctgctaaaccatgccacagacgtgtactctgtttcgacagcactactgctcctgtggcaaatacgcaggggccaaaccataagatggtgtcccaaaacaaagaaaggaatgcagtctcttttcctaatcttgactcacccaatgtgtcctccaccttaaaacccccttctaataatgctatcaaaagagagaaagagaagcctcctctgcctaagattttatctaaatcggaaagtgccattagccggcataccaccataagagaaactcaatcagaaaagaaagtttcaccaacagaaattgtgcttgaatctttccataaagcaacagctaataaggagaatgaattatgcagcgatgtagaaagacagaaaaatccagaaaattcaaaactatctattgggcagcaaaatgggggtttgcgaagtgagaaatctatagcttcactgcaagaaatgaccaaaaaacaaggcacatcttcaaacaataaaaatgtactttcagtaggtacagctgtgaaggatctaaaacaagaacaaactaaatccgccagttctttgattaccacagaaatgttacaggatatacagaggcacagctcagtaagtaggcttgctgatagtagtgatttacctgtgccccggacacctggctcaggggcaggggaaaaacataaagaagaacctatagatattatcaaggccccctctagtaggcgtttcagtgaagacagtagtacatcaaaagtaatggtccctcctgtcaccccagacttgcctgcctgcagccctgccagtgaaacaggaagtgaaaacagtgtaaatatggctgcccacacattaatgattctctccagggcagccatttctaggactacttcagcaactcctctgaaagataacacacaacagtttagagcatcttcaaggagcaccacaaaaaagcggaaaattgaggaattagatgaacgtgagcgaaactctcgtccttctagtaaaaatcttacaaattcatcaataccaatgaaaaagaagaaaattaagaaaaagaagcttcccagttcatttccagcaggaatggatgtagacaaatttttgttatcattgcattatgatgagtaa

SEQ ID NO: 57 - DNA, 3867 bp, Homo sapiens;
atgggcagccccgagggccgcttccactttgccatcgaccgtgggggtaccttcacagacgtctttgcccagtgcccaggggggcacgtgcgggtcttaaaactgctctcagaggaccctgccaactatgcggacgcgccaaccgaaggcatccgccgcatcctggagcaggaggccggcatgctcctgccccgggaccagccgctggactccagtcatatcgccagcatccgcatgggcaccacagtggccaccaacgcactgctggagcggaagggggagcgggtggcgctgctggtgacacgtggcttccgagacctgctgcacattggcacccaagcccgtggggacctctttgacctggccgtgcccatgcctgaggtgctgtatgaagaggtgctggaggtggacgaacgcgtggtgctgcaccgtggagaggcgggcaccgggacgcctgtgaaaggccgcacgggggacctgctggaagtgcagcagcctgtggacctgggggccctgcgtgggaagctggaggggctgctatctcgaggcatccgcagcctggctgtggtgctcatgcactcgtacacgtgggcccagcatgagcagcaggtgggtgtgctggcccgggagctgggcttcacgcacgtgtcactgtcctcggaggccatgcccatggtgcgcatcgtccctcgggggcacacggcctgtgccgacgcctacctcacgcccgccatccagcgctacgtgcagggcttctgccgtggcttccagggccaactcaaggatgtgcaggtgttgttcatgcgctccgatggcggcctggcgcccatggacaccttcagcggctccagtgctgtgctctcgggcccggccggcggcgtggtgggctactcagccaccacctaccagcaggagggtggccagcctgtcatcggctttgacatgggaggcacgtccacggatgtgagccgctatgctggggaattcgagcacgtcttcgaggccagcacagctggcgtcaccctccaggccccgcagctggacatcaacaccgtggcagcgggagggggttcccgcctcttcttcaggtctggcctctttgtggttgggcccgagtcagcaggagcccacccaggacccgcctgctaccgcaaagggggccctgtgacagtgacggatgctaatctggtcctgggtcgcctgctgcctgcctccttcccctgcatttttgggccgggagagaaccaaccactttcccctgaggcctcccgcaaagccctggaggctgtggccactgaggtcaacagcttcctgaccaacgggccctgcccggcctccccgctgagcctggaggaggtggccatggggttcgtgcgcgtggccaacgaggccatgtgccggcccatccgtgcactcacgcaggcaagaggccatgacccctcagcccatgtgctggcctgctttgggggagctggtgggcagcatgcatgtgccatcgcccgggccctgggcatggacacggtgcacatccacaggcacagtgggctgctgtcggccctggggctggccctggctgacgtggtgcatgaggcacaggaaccctgctccctgctctacgcgcctgagaccttcgtgcagctggaccagaggctgagccgcctggaggagcagtgtgtggatgctctgcaggcccagggcttccccaggtcccagatcagcactgagagcttcctgcacctgcgctaccagggcacggactgtgctctgatggtgtctgcccaccagcacccagccacagcccgctcgccccgtgcgggggacttcggggcagcctttgtggagcggtacatgagggagtttggctttgtcatacctgagcggccggtggtcgtggacgatgtgcgagtgcggggcaccggccgcagtggtcttcgcctcgaggatgcccccaaagcccagaccgggcctccccgggtggacaagatgacccagtgctactttgaggggggctaccaggagacccctgtgtacctgctggcagagctgggctatgggcacaagctccatgggccctgcctcatcatcgacagtaacagcaccatcctggtggagccaggttgccaggcagaggtgaccaagacaggggacatctgcatctccgtgggggccgaagtccccggcacagtgggcccccagctggaccctatccagctgtccatcttctcacaccgcttcatgagcattgctgagcagatgggccgcatcctgcagcgcacagccatctccaccaacatcaaggagcgtctggacttctcctgtgccctctttgggcccgatggggggctggtgtccaatgccccccacatccctgtgcacctgggtgccatgcaggagacggtgcagttccagattcagcacctgggggccgatctccaccctggcgacgtgctactgagcaaccatcccagtgccgggggcagccacctgccagacctgactgttatcacaccggtgttttggccgggtcagacgcggcctgtgttctatgtggccagccgagggcaccacgcagacatcgggggcatcacaccaggctccatgcccccccactccaccatgctgcaacaggagggtgccgtctttctgtccttcaaacttgtccaggggggcgtcttccaggaggaggcggtgacggaggccctgcgggcgccaggcaaggtccccaactgcagcggaaccagaaacctgcacgacaacctgtcggacctccgtgcccaggtggcagccaaccagaagggcatccagctggtgggggagctcattgggcagtacggcctggacgtggtgcaggcctacatgggccatattcaggcaaacgctgagctggccgtgcgagacatgttgcgtgcctttggaacctcccggcaggcccggggcctgcccctggaggtgtcctcggaagaccacatggacgacggttcccccatccgcctccgtgtgcagatcagcctgagtcagggcagcgccgtgtttgacttcagcggcactgggccggaggtgtttggtaatctcaacgcaccgcgggccgtaaccctgtccgccctcatctactgcctgcgctgtctggtgggccgcgacatcccactcaaccagggctgcctggcgccagtgcgcgtggtcattccccgaggctccatcctggacccgtcgcccgaggcggcggtggtgggcggcaacgtgctcacgtcgcagcgcgtggtggatgtcatcctgggggcctttggggcctgcgccgcctcccagggctgcatgaacaacgtgaccctgggcaacgcccacatgggctactacgagacggtggcgggcggcgcgggcgcgggtcccagctggcacgggcgcagcggtgtgcacagccacatgaccaacacacgcatcaccgaccctgagatcctggagagccggtacccggtcatcctgcgccgcttcgagctgcggcggggctcggggggcagaggccgcttccgaggcggcgacggcgtcacccgcgagctgctctttcgtgaggaggcgctgctgtcagtgctgaccgagcgccgcgccttccggccatacgggctccacgggggcgagcctggcgcccgcggcctaaacctgctgatccgcaaaaacggccggacggtgaatctgggcggcaagacgtcggtgaccgtgtaccccggggatgtgttctgtctccacacgcccggcggcggtggctatggggacccggaggaccccgccccaccgccggggtcgcccccgcaagcactggcctttcccgagcacggcagcgtctatgagtatcgccgggcccaggaggccgtgtga

SEQ ID NO: 58 - DNA, 2565 bp, Homo sapiens;
atggggatgtgttcaaggcaagagcgaattcagaaggatatcgacgtcgtgatccagaagtccagagctgagaaggactgcctgtttgcagatttcagatactctgactccacctttacttttacctacgttggcggccccagaagtgtatcctactcagtacatgtatctgaagattacccagataatacatatgtgtcaagttcagagaatgatgaagatgtgctagttactacagagccaataccagtaatttttcatagaatagcaacagaattaagaaaaacaaatgacattaactgttgcttatccataaaatccaaattacaaaaggaaaatggggaggaatcaagacagaatagtacagtggaggaagattctgaaggtgacaatgattccgaagaattttattacggagggcaggtgaactatgatggggaactgcacaagcacccacaactggaagctgatttgtcagcagttagagagatatatgggccacatgcagtttctctcagggaatatggagccattgatgatgtagatattgatctgcatatcgatgttagctttcttgatgaggagattgctgtggcttgggaagtaattcgaacagaacctataattgttcgactacactgttcacttacacagtatttaaatggcccagtgcccactgttgatgtctttcagatttccacaaaagagcgatttggattgggacatcagctgaaaaaaatcatgcagacatttgttacacagcagtggaaacagagcaaagaaaaatccaattgcctgcacaataaaaagttgtcagagaagaaagtgaagtctcccctgcatttattttctactttgcgcaggtcgccaagttatcctccccctggttgtggcaaaagcaaatccaaactgaaatctgagcaggacggaatctccaaaacgcataagctgctgcggaggacttgttccagcacagtcaagactgatgatgtgtgtgtcacaaagtcacacaggacctttggccgctccttgtccagcgatcccagggcggagcaggctatgacagcaattaaatcgcacaaacttttgaaccgtccttgccctgcagctgttaagtcagaggaatgcctaactctaaagtcgcatagactattgactcgatcttgttctggagatccacgatgtgagcacaacacaaacttgaagccccataaactgttaagcaggtcttactctagtaatctcagaatggaagaattatatggactgaaaaatcacaaattgctcagcaagtcctactccagtgcccccaagtcatccaaaactgagcttttcaaggaacctaacgcagagggcaggaggctctctcttacctcagggcttattggtatcctaacaccatcttcatcttcatcttctcagcttgctccaaatggtgcaaaatgcattccagtacgagaccgtggcttcctggtgcagacaattgagtttgctgaacagcggatccctgtattaaatgaatattgtgtggtttgtgatgagccacatgtgtttcaaaatggccctatgcttaggcctaccgtatgtgaacgggagctgtgtgtgtttgcttttcaaaccctgggagtaatgaatgaagctgctgatgaaatagcaactggagctcaggtggtagatctactagtatccatgtgtaggtctgcgttggaatctcctagaaaagttgtgattttcgagccatatccttctgtggtagatcctaatgatcctcagatgttggccttcaaccccaggaaaaagaactatgatcgagtaatgaaagcactggatagcataacttctatcagagaaatgacacaagcaccatatctggaaatcaagaagcaaatggataaacaggacccccttgctcatcccttactgcaatgggttatatcaagtaatagatcacatattgtgaaactgccagttaacaggcaattgaagtttatgcatactccacatcagttccttcttctcagcagtccaccagccaaagaatccaattttagagctgctaaaaaactctttggaagcacctttgcatttcatggctcacacattgaaaactggcactccatcctgaggaatggtctggttgttgcttctaatacacgattgcagctccatggtgcaatgtatggaagtggaatctatcttagtccaatgtcaagcatatcatttggttactcagggatgaacaagaaacagaaggtgtcagccaaggacgagccagcttcaagcagtaaaagcagcaatacatcacagtcacagaaaaaaggacagcaatcccaattcctgcaaagccgtaacttaaaatgcatagccttatgtgaagtgatcacctcatctgacctgcacaaacatggagagatatgggttgtccccaatactgaccatgtctgcacacgattctttttcgtctatgaagacggccaagtgggagatgcaaatattaatacacaagaaggaggcattcacaaagagatcctccgagtaattggtaatcaaactgctactggttaa

SEQ ID NO: 59 - DNA, 1248 bp, Homo sapiens;
atgaggggcgcgaacgcctgggcgccactctgcctgctgctggctgccgccacccagctctcgcggcagcagtccccagagagacctgttttcacatgtggtggcattcttactggagagtctggatttattggcagtgaaggttttcctggagtgtaccctccaaatagcaaatgtacttggaaaatcacagttcccgaaggaaaagtagtcgttctcaatttccgattcatagacctcgagagtgacaacctgtgccgctatgactttgtggatgtgtacaatggccatgccaatggccagcgcattggccgcttctgtggcactttccggcctggagcccttgtgtccagtggcaacaagatgatggtgcagatgatttctgatgccaacacagctggcaatggcttcatggccatgttctccgctgctgaaccaaacgaaagaggggatcagtattgtggaggactccttgacagaccttccggctcttttaaaacccccaactggccagaccgggattaccctgcaggagtcacttgtgtgtggcacattgtagccccaaagaatcagcttatagaattaaagtttgagaagtttgatgtggagcgagataactactgccgatatgattatgtggctgtgtttaatggcggggaagtcaacgatgctagaagaattggaaagtattgtggtgatagtccacctgcgccaattgtgtctgagagaaatgaacttcttattcagtttttatcagacttaagtttaactgcagatgggtttattggtcactacatattcaggccaaaaaaactgcctacaactacagaacagcctgtcaccaccacattccctgtaaccacgggtttaaaacccaccgtggccttgtgtcaacaaaagtgtagacggacggggactctggagggcaattattgttcaagtgactttgtattagccggcactgttatcacaaccatcactcgcgatgggagtttgcacgccacagtctcgatcatcaacatctacaaagagggaaatttggcgattcagcaggcgggcaagaacatgagtgccaggctgactgtcgtctgcaagcagtgccctctcctcagaagaggtctaaattacattattatgggccaagtaggtgaagatgggcgaggcaaaatcatgccaaacagctttatcatgatgttcaagaccaagaatcagaagctcctggatgccttaaaaaataagcaatgttaa

SEQ ID NO: 60 - DNA, 1038 bp, Homo sapiens;
atgagcctcttcgggcttctcctgctgacatctgccctggccggccagagacaggggactcaggcggaatccaacctgagtagtaaattccagttttccagcaacaaggaacagaacggagtacaagatcctcagcatgagagaattattactgtgtctactaatggaagtattcacagcccaaggtttcctcatacttatccaagaaatacggtcttggtatggagattagtagcagtagaggaaaatgtatggatacaacttacgtttgatgaaagatttgggcttgaagacccagaagatgacatatgcaagtatgattttgtagaagttgaggaacccagtgatggaactatattagggcgctggtgtggttctggtactgtaccaggaaaacagatttctaaaggaaatcaaattaggataagatttgtatctgatgaatattttccttctgaaccagggttctgcatccactacaacattgtcatgccacaattcacagaagctgtgagtccttcagtgctacccccttcagctttgccactggacctgcttaataatgctataactgcctttagtaccttggaagaccttattcgatatcttgaaccagagagatggcagttggacttagaagatctatataggccaacttggcaacttcttggcaaggcttttgtttttggaagaaaatccagagtggtggatctgaaccttctaacagaggaggtaagattatacagctgcacacctcgtaacttctcagtgtccataagggaagaactaaagagaaccgataccattttctggccaggttgtctcctggttaaacgctgtggtgggaactgtgcctgttgtctccacaattgcaatgaatgtcaatgtgtcccaagcaaagttactaaaaaataccacgaggtccttcagttgagaccaaagaccggtgtcaggggattgcacaaatcactcaccgacgtggccctggagcaccatgaggagtgtgactgtgtgtgcagagggagcacaggaggatag

SEQ ID NO: 61 - DNA, 4344 bp, Homo sapiens;
atggctcattcaaagactaggaccaatgatggaaaaattacatatccgcctggggtcaaggaaatatcagataaaatatctaaagaggagatggtgagacgattaaagatggttgtgaaaacttttatggatatggaccaggactctgaagaagaaaaggagctttatttaaacctagctttacatcttgcttcagatttttttctcaagcatcctgataaagatgttcgcttactggtagcctgctgccttgctgatattttcaggatttatgctcctgaagctccttacacatcccctgataaactaaaggatatatttatgtttataacaagacagttgaaggggctagaggatacaaagagcccacaattcaataggtatttttatttacttgagaacattgcttgggtcaagtcatataacatatgctttgagttagaagatagcaatgaaattttcacccagctatacagaaccttattttcagttataaacaatggccacaatcagaaagtccatatgcacatggtagaccttatgagctctattatttgtgaaggtgatacagtgtctcaggagcttttggatacggttttagtaaatctggtacctgctcataagaatttaaacaagcaagcatatgatttggcaaaggctttactgaagaggacagctcaagctattgagccatatattaccaatttttttaatcaggttctgatgcttgggaaaacatctatcagcgatttgtcagagcatgtctttgacttaattttggagctctacaatattgatagtcatttgctgctctctgttttaccccagcttgaatttaaattaaagagcaatgataatgaggagcgcctacaagttgttaaactactggcaaaaatgtttggggcaaaggattcagaattggcttctcaaaacaagccactttggcagtgctacttgggcaggtttaatgatatccatgtaccaatccgcctggaatgtgtgaaatttgctagccattgtctcatgaaccatcctgatttagcaaaagacttaacagagtatcttaaagtgaggtcacatgaccctgaggaagctattagacatgatgttattgtgtcaatagttacagctgctaaaaaggatattcttctggtcaatgatcacttacttaattttgtgagagagagaacattagacaaacgatggagagtacgcaaagaagccatgatgggacttgcccaaatttataagaaatatgctttacagtcagcagctggaaaagatgctgcaaaacagatagcatggatcaaagacaaattgctacatatatattatcaaaatagtattgatgatcgactacttgttgaacggatctttgctcaatacatggttcctcacaatttagaaactacagaacggatgaaatgcttatattacttgtatgccacactggatttaaatgctgtgaaagcattgaatgaaatgtggaaatgtcaaaatctgctccgacatcaagtaaaggatttgcttgacttgattaagcaacccaaaacagatgccagtgtcaaggccatattttcaaaagtgatggttattacaagaaatttacctgatcctggtaaggctcaggatttcatgaagaaattcacacaggtgttagaagatgatgagaaaataagaaagcagttagaagtacttgttagtccaacatgctcctgcaagcaggctgaaggttgtgtgcgtgaaataactaagaagttgggcaaccccaaacagcctacaaatcctttcctggaaatgatcaagtttctcttggagaggatagcacctgtgcacatagataccgaatctatcagtgctcttattaaacaagtgaacaaatcaatagatggaacagcagatgatgaagatgagggtgttccaactgatcaagccatcagagcaggtcttgaactgcttaaggtactctcatttacacatcccatctcatttcattctgctgaaacatttgaatcattactggcttgtctgaaaatggatgatgaaaaagtagcagaagctgcactacaaattttcaaaaacacaggaagcaaaattgaagaggattttccacacatcagatcagccttgcttcctgttttacatcacaaatctaaaaaaggacccccccgtcaagccaaatatgccattcattgtatccatgcgatattttctagtaaagagacccagtttgcacagatatttgagcctctgcataagagcctagatccaagcaacctggaacatctcataacaccattggttactattggtcatattgctctccttgcacctgatcaatttgctgctcctttgaaatctttggtagctactttcattgtgaaagatcttctcatgaatgatcggcttccagggaaaaagacaactaaactttgggttccagatgaagaagtatctcctgagacaatggtcaaaattcaggctattaaaatgatggttcgatggctacttggaatgaaaaataatcacagtaaatcaggaacttctaccttaagattgctaacaacaatattgcatagtgatggagacttgacagaacaggggaaaattagtaaaccagatatgtcacgtctgagacttgctgctgggagtgctattgtgaagctggcacaagaaccctgttaccatgaaatcatcacattagaacaatatcagctatgtgcattagctatcaacgatgaatgctatcaagtaagacaagtgtttgcccagaaacttcacaaaggcctttcccgtttacggcttccacttgagtatatggcaatctgtgccctttgtgcaaaagatcctgtaaaggagagaagagctcatgctaggcaatgtttggtgaaaaatataaatgtaaggcgggagtatctgaagcagcatgcagctgttagtgaaaaattattgtctcttctaccagagtatgttgttccatatacaattcaccttttggcacatgacccagattatgtcaaagtacaggatattgaacaacttaaagatgttaaagaatgtctttggtttgttctggaaatattaatggctaaaaatgaaaataacagtcacgcttttatcagaaagatggtagaaaatattaaacaaacaaaagatgcccaaggaccagatgatgcaaaaatgaatgaaaaactgtacactgtgtgtgatgttgccatgaatatcatcatgtcaaagagtactacatacagtttggaatctcctaaagacccggtactaccagctcgtttcttcactcaacctgacaagaatttcagtaacaccaaaaattatctgcctcctgaaatgaaatcatttttcactcctggaaaacctaaaacaaccaatgttctaggagctgttaacaagccactttcatcagcaggcaagcaatctcagaccaaatcatcacgaatggaaactgtaagcaatgcaagcagcagctcaaatccaagctctcctggaagaataaaggggaggcttgatagttctgaaatggatcacagtgaaaatgaagattacacaatgtcttcacctttgccggggaaaaaaagtgacaagagagacgactctgatcttgtaaggtctgaattggagaagcctagaggcaggaaaaaaacgcccgtcacagaacaggaggagaaattaggtatggatgacttgactaagttggtacaggaacagaaacctaaaggcagtcagcgaagtcggaaaagaggccatacggcttcagaatctgatgaacagcagtggcctgaggaaaagaggctcaaagaagatatattagaaaatgaagatgaacagaatagtccgccaaaaaagggtaaaagaggccgaccaccaaaacctcttggtggaggtacaccaaaagaagagccaacaatgaaaacttctaaaaaaggaagcaaaaaaaaatctggacctccagcaccagaggaggaggaagaagaagaaagacaaagtggaaatacggaacagaagtccaaaagcaaacagcaccgagtgtcaaggagagcacagcagagagcagaatctcctgaatctagtgcaattgaatccacacagtccacaccacagaaaggacgaggaagaccatcaaaaacgccatcaccatcacaaccaaaaaaaaatgtccgtgtaggacgctccaaacaagcagctactaaggaaaatgattcaagtgaagaagtagatgtgtttcagggtagctctcctgtcgatgatattccacaggaagaaacagaggaggaggaagtttctacagtaaatgtacggcggcgaagtgctaaaagggaacggcgatga

SEQ ID NO: 62 - DNA, 6120 bp, Homo sapiens;
atggatatagttgatacatttaatcatttaattcctactgaacacttagatgatgccctatttctaggatccaacctggagaatgaagtctgtgaggattttagtgcaagtcaaaatgtcttagaggactcgctgaagaacatgctcagcgataaggatcctatgctaggatctgcaagtaaccagttctgtttgcctgttttggatagcaatgatcccaatttccagatgccttgttcaacagttgttggtcttgacgatattatggatgaaggagttgttaaagaaagtggcaatgataccattgatgaagaagaactgattttacctaacaggaacttaagggacaaggtagaagaaaattcagtgagatctccaagaaaatcacctcgtttaatggcacaagaacaagtaagaagtttgcgacagagcactattgccaagcgttcaaatgcagcaccattaagtaacacaaaaaaagcatctgggaagactgtatctactgctaaagcaggagtgaaacaaccagaaaggagtcaggttaaagaagaagtatgtatgtcactgaaacctgagtaccataaggagaatagaaggtgcagccgaaatagcggacaaattgaagtggtacctgaagtatcagtgtcttcaagtcattcttcagtgtcatcttgtcttgaaatgaaggatgaagatggattagattctaagcataagtgtaataatccgggagaaatagatgtgccatctcatgaattaaattgttcacttctttcagagacttgtgttactattggagaaaagaaaaatgaagctttgatggaatgtaaagccaagcctgttggtagtccattgtttaagttttcagataaagaagaacatgaacaaaatgattccatttcaggtaaaacgggtgagactgttgttgaagaaatgatagcaacaagaaaagttgaacaagattcaaaggagacagtaaaattatcccatgaagatgaccatattcttgaggacgctggatcttctgatatttctagtgatgctgcttgtacaaatccaaataagacagaaaacagccttgtaggtttgcctagttgtgtagatgaagtgactgaatgtaatttggaattgaaggataccatgggtattgctgataaaactgagaacacccttgaaagaaataaaattgaaccgttgggttattgtgaagatgcggagtctaataggcagttggagagcactgagtttaataaatcaaacttagaggtggttgatactagtacttttggaccggaaagtaatatcttggaaaatgctatttgtgatgtgcctgaccaaaattcaaaacagttgaatgctatagaaagtactaaaatagagtcccatgaaacagcaaaccttcaggatgacagaaacagccagtcaagtagcgtttcttacttagagtcaaaaagtgtaaaatccaaacatacaaaacctgtaattcattctaagcaaaacatgaccacagatgctccgaagaaaattgttgcagcaaagtatgaagtaatacatagcaaaactaaagttaatgtcaaaagtgtgaaacgaaatactgatgtaccagaatctcagcaaaattttcataggccagtcaaagtcagaaaaaaacaaattgataaggagccaaagattcagagttgcaattctggggttaaatctgtgaaaaaccaagctcattctgtactgaaaaaaacattacaggatcaaactttagtacaaattttcaagcccttaactcattctttgagtgataagtcacacgctcatcctggttgcttgaaagaacctcatcatcctgcacaaactggacatgtatcacattctagccagaaacagtgtcataagcctcagcaacaggccccagcaatgaaaaccaatagtcacgtgaaggaagagcttgaacacccaggcgttgagcattttaaggaagaggataaactgaaactgaaaaaacctgagaagaacctacaaccccgccaaagaagaagcagcaaaagtttttctttagatgagccaccattgttcattccagataacatagctaccataagaagagaaggctctgatcatagctcctcatttgaaagcaaatatatgtggactcccagcaagcagtgtgggttttgcaaaaaaccacatggcaacaggtttatggttggctgtgggagatgtgatgactggtttcatggtgattgtgttgggttaagtctttctcaagcacagcagatgggcgaggaagacaaagaatatgtctgtgtaaaatgttgtgctgaagaagacaaaaagactgaaatactagatccagatactttggaaaaccaagctacagttgaattccatagtggagataaaacaatggagtgtgaaaagcttggattatcaaaacacacaacaaatgatagaaccaaatatatagatgatacagtgaagcacaaggtcaaaattttaaaacgggagtctggtgaaggcagaaattcatcagactgtagagataatgaaattaaaaaatggcagctagctcctcttcgtaagatgggacaaccagttttacctcggagatcctcagaagaaaaaagtgaaaaaataccgaaagagtctacaactgttacttgcacaggagaaaaagcttcaaaaccaggtactcatgagaagcaagagatgaaaaagaagaaagttgaaaaaggagtgcttaatgtacatcctgctgcttctgcttccaagccttctgcagatcagatcaggcaaagtgtcagacattctctcaaagacattcttatgaagagacttacagactcaaatttgaaggtaccagaggaaaaggcagcaaaagttgccacaaaaattgagaaagagcttttctctttttttcgggacacagatgctaaatataagaacaaatatagaagtttgatgtttaatttgaaagatcctaaaaacaatatattatttaaaaaagtactgaaaggagaagtaactcctgatcatcttatcagaatgagtccagaagaactagcttctaaagagttagctgcttggagacgaagagaaaacagacataccatagaaatgattgagaaagagcagagagaagtggaacgacggccaatcaccaaaataactcataaaggtgaaatagaaattgagagtgatgccccaatgaaagaacaggaagcagccatggagattcaggaaccagccgccaataagtcattggagaagccagaaggatctgaaaaacaaaaagaggaggttgactctatgtctaaagataccactagtcaacacagacagcatctttttgatctcaactgcaaaatctgcataggtcgaatggcaccacctgtagatgatctttctccaaaaaaagtaaaagttgttgtaggagtagctcgcaaacattcagacaatgaagcagaaagtatagcagatgcattatcttcaacctcaaatattttggcttctgaattctttgaggaggagaaacaggagtctccaaagtcaacgttctctcctgctccacgtccagagatgcctggaactgttgaagttgagtctacctttctggctcgattgaacttcatctggaaaggttttatcaacatgccttctgtggcaaaatttgttaccaaagcctatccagtatctggctccccagaatacctgacagaggacctaccagatagtattcaagtaggtggcaggatatcacctcagacagtttgggattatgtggaaaaaataaaagcatcaggaaccaaggaaatttgtgtggttcgcttcacaccagtaactgaagaagatcaaatttcttatactttgctctttgcatacttcagtagcagaaagcgctatggagtagctgctaacaacatgaagcaggttaaagatatgtaccttattcctttgggtgccacagataaaattccacaccctcttgtgccttttgatggacctgggcttgaactgcatagacctaatctattgttgggcttaattattcgtcagaaactgaagcgacagcacagtgcctgtgctagtactagtcatatagctgagactcctgaaagtgcaccaccaatagcattgccacctgataaaaaaagtaaaatagaagtttctacagaagaagcaccagaggaagaaaatgacttttttaattcttttacaactgtattacacaagcagagaaataaacctcagcagaatcttcaggaagaccttccaacagcagttgaacctttaatggaagtcaccaaacaggagccaccaaaacctttaagatttcttcctggcgtgttgattggctgggagaatcaacctactactctggaattagcaaataaacctcttcctgtggatgatatacttcaaagccttttgggcaccactggtcaagtatatgaccaggcccagtcagtgatggaacaaaacactgttaaagaaattccatttttaaatgagcagaccaactcaaaaatagagaaaacagataatgtggaagtaactgatggtgaaaacaaggagataaaagttaaagtagataatatttcagaatctacagataagtcagcagaaatagaaacatcagtagtagggtcctcttccatttctgcagggtctttgacgagtcttagtctcagaggtaagccaccagatgtttctacagaagcatttttaacaaatttatcaattcagtcaaaacaagaggaaactgtggagagtaaagagaaaacattaaaaagacagcttcaggaagatcaagagaataatttgcaagataaccagacttcaaatagttctccatgcagatctaatgtaggaaaaggaaacatagatggtaatgtgagctgtagtgaaaaccttgttgctaatacagcgaggtctccacagtttatcaacctgaaaagggatcctaggcaagcagcaggacgaagtcagcctgtaactacttcagaaagcaaagatggagatagttgccggaatggagaaaaacacatgctgcctggcctgtcacacaacaaggagcacttaacagaacaaatcaatgtagaggaaaagttgtgttctgcagagaaaaactcgtgtgttcagcagagtgacaatttaaaagttgcacaaaactcaccatcagtagaaaacatacagacttctcaagcagaacaagcaaaacccttacaggaggatattttaatgcaaaatattgaaactgtgcacccatttcgaagaggatcagcagtagcgacatctcattttgaagttggaaacacatgtccatcagaatttccttctaaaagcatcacctttacttccagaagcaccagccccagaacaagtacaaacttttcacccatgaggccacagcagcccaaccttcagcatctcaagtctagcccacctggatttccatttccagggcctcctaattttcccccacaaagcatgtttggatttccaccacatttgccacctccattacttccccctccaggctttggctttgctcaaaatcccatggttccctggccacctgttgttcatctcccaggtcagccacagcgtatgatgggtcctctctcacaagcatcaaggtatataggcccgcagaatttttaccaggttaaagacattcggaggccagaaaggcgccatagtgacccttggggtaggcaagaccaacagcaactggataggccatttaataggggtaaaggggaccgccagagattttatagtgattcacaccatttgaaaagagagcgacatgaaaaggaatgggagcaagaatctgaaaggcatagacgcagagacagaagccaagacaaggacagagacagaaaaagcagggaggaagggcacaaagataaagagagggcacggttatcacatggtgatcgaggaacagatggaaaagcaagcagagatagtaggaatgtagacaagaagccagataaacctaaaagtgaagactatgagaaggacaaagaacgagagaaaagtaaacacagagaaggagaaaaggacagggataggtaccacaaagatagggaccacactgacagaactaaaagcaaaaggtaa

SEQ ID NO: 63 - DNA, 5061 bp, Homo sapiens;
atggctcagatatctagcaacagcggatttaaagaatgtccatcttcacatccggaaccaacaagagcaaaagatgtggacaaagaagaagcattacagatggaagcagaggctttagcaaaactgcaaaaggatagacaagtgactgacaatcagagaggctttgagttgtcaagcagcaccagaaaaaaagcacaggtttataacaagcaggattatgatctcatggtgtttcctgaatcagattcccaaaaaagagcattagatattgatgtagaaaagctcacccaagctgaacttgagaaactattgctggatgacagtttcgagactaaaaaaacacctgtattaccagttactcctattctgagcccttccttttcagcacagctctattttagacctactattcagagaggacagtggccacctggattacctgggccttccacttatgctttaccttctatttatccttctacttacagtaaacaggctgcattccaaaatggcttcaatccaagaatgcccacttttccatctacagaacctatatatttaagtcttccgggacaatctccatatttctcatatcctttgacacctgccacaccctttcatccacaaggaagcttacctatctatcgtccagtagtcagtactgacatggcaaaactatttgacaaaatagctagtacatcagaatttttaaaaaatgggaaagcaaggactgatttggagataacagattcaaaagtcagcaatctacaggtatctccaaagtctgaggatatcagtaaatttgactggttagacttggatcctctaagtaagcctaaggtggataatgtggaggtattagaccatgaggaagagaaaaatgtttcaagtttgctagcaaaggatccttgggatgctgttcttcttgaagagagatcgacagcaaattgtcatcttgaaagaaaggtgaatggaaaatccctttctgtggcaactgttacaagaagccagtctttaaatattcgaacaactcagcttgcaaaagcccagggccatatatctcagaaagacccaaatgggaccagtagtttgccaactggaagttctcttcttcaagaagttgaagtacagaatgaggagatggcagctttttgtcgatccattacaaaattgaagaccaaatttccatataccaatcaccgcacaaacccaggctatttgttaagtccagtcacagcacaaagaaacatatgcggagaaaatgctagtgtgaaggtctccattgacattgaaggatttcagctaccagttacttttacgtgtgatgtgagttctactgtagaaatcattataatgcaagccctttgctgggtacatgatgacttgaatcaagtagatgttggcagctatgttctaaaagtttgtggtcaagaggaagtgctgcagaataatcattgccttggaagtcatgagcatattcaaaactgtcgaaaatgggacacagaaattagactacaactcttgaccttcagtgcaatgtgtcaaaatctggcccgaacagcagaagatgatgaaacacccgtggatttaaacaaacacctgtatcaaatagaaaaaccttgcaaagaagccatgacgagacaccctgttgaagaactcttagattcttatcacaaccaagtagaactggctcttcaaattgaaaaccaacaccgagcagtagatcaagtaattaaagctgtaagaaaaatctgtagtgctttagatggtgtcgagactcttgccattacagaatcagtaaagaagctaaagagagcagttaatcttccaaggagtaaaactgctgatgtgacttctttgtttggaggagaagacactagcaggagttcaactaggggctcacttaatcctgaaaatcctgttcaagtaagcataaaccaattaactgcagcaatttatgatcttctcagactccatgcaaattctggtaggagtcctacagactgtgcccaaagtagcaagagtgtcaaggaagcatggactacaacagagcagctccagtttactatttttgctgctcatggaatttcaagtaattgggtatcaaattatgaaaaatactacttgatatgttcactgtctcacaatggaaaggatctttttaaacctattcaatcaaagaaggttggcacttacaagaatttcttctatcttattaaatgggatgaactaatcatttttcctatccagatatcacaattgccattagaatcagttcttcaccttactctttttggaattttaaatcagagcagtggaagttcccctgattctaataagcagagaaagggaccagaagctttgggcaaagtttctttacctctttttgactttaaacggtttttaacatgtggaactaaacttctatatctttggacttcatcacatacaaattctgttcctggaacagttaccaaaaaaggatatgtcatggaaagaatagtgctacaggttgattttccttctcctgcatttgatattatttatacaactcctcaagttgacagaagcattatacagcaacataacttagaaacactagagaatgatataaaagggaaacttcttgatattcttcataaagactcatcacttggactttctaaagaagataaagcttttttatgggagaaacgttattattgcttcaaacacccaaattgtcttcctaaaatattagcaagcgccccaaactggaaatgggttaatcttgccaaaacttactcattgcttcaccagtggcctgcattgtacccactaattgcattggaacttcttgattcaaaatttgctgatcaggaagtaagatccctagctgtgacctggattgaggccattagtgatgatgagctaacagatcttcttccacagtttgtacaagctttgaaatatgaaatttacttgaatagttcattagtgcaattccttttgtccagggcattgggaaatatccagatagcacacaatttatattggcttctcaaagatgccctgcatgatgtacagtttagtacccgatacgaacatgttttgggtgctctcctgtcagtaggaggaaaacgacttagagaagaacttctaaaacagacgaaacttgtacagcttttaggaggagtagcagaaaaagtaaggcaggctagtggatcagccagacaggttgttctccaaagaagtatggaacgagtacagtccttttttcagaaaaataaatgccgtctccctctcaagccaagtctagtggcaaaagaattaaatattaagtcgtgttccttcttcagttctaatgctgtccccctaaaagtcacaatggtgaatgctgaccctatgggagaagaaattaatgtcatgtttaaggttggtgaagatcttcggcaagatatgttagctttacagatgataaagattatggataagatctggcttaaagaaggactagatctgaggatggtaattttcaaatgtctctcaactggcagagatcgaggcatggtggagctggttcctgcttccgataccctcaggaaaatccaagtggaatatggtgtgacaggatcctttaaagataaaccacttgcagagtggctaaggaaatacaatccctctgaagaagaatatgaaaaggcttcagagaactttatctattcctgtgctggatgctgtgtagccacctatgttttaggcatctgtgatcgacacaatgacaatataatgcttcgaagcacgggacacatgtttcacattgactttggaaagtttttgggacatgcacagatgtttggcagcttcaaaagggatcgggctccttttgtgctgacctctgatatggcatatgtcattaatgggggtgaaaagcccaccattcgttttcagttgtttgtggacctctgctgtcaggcctacaacttgataagaaagcagacaaacctttttcttaacctcctttcactgatgattccttcagggttaccagaacttacaagtattcaagatttgaaatacgttagagatgcacttcaaccccaaactacagacgcagaagctacaattttctttactaggcttattgaatcaagtttgggaagcattgccacaaagtttaacttcttcattcacaaccttgctcagcttcgtttttctggtcttccttctaatgatgagcccatcctttcattttcacctaaaacatactcctttagacaagatggtcgaatcaaggaagtctctgtttttacatatcataagaaatacaacccagataaacattatatttatgtagtccgaattttgagggaaggacagattgaaccatcatttgtcttccgaacatttgacgaatttcaggaacttcacaataagctcagtattatttttccactttggaagttaccaggctttcctaataggatggttctaggaagaacacacataaaagatgtagcagccaaaaggaaaattgagttaaacagttacttacagagtttgatgaatgcttcaacggatgtagcagagtgtgatcttgtttgtactttcttccaccctttacttcgtgatgagaaagctgaagggatagctaggtctgcagatgcaggttccttcagtcctactccaggccaaataggaggagctgtgaaattatccatctcttaccgaaatggtactcttttcatcatggtgatgcatatcaaagatcttgttactgaagatggagctgacccaaatccatatgtcaaaacatacctacttccagataaccacaaaacatccaaacgtaaaaccaaaatttcacgaaaaacgaggaatccgacattcaatgaaatgcttgtatacagtggatatagcaaagaaaccctaagacagcgagaacttcaactaagtgtactcagtgcagaatctctgcgggagaattttttcttgggtggagtaaccctgcctttgaaagatttcaacttgagcaaagagacggttaaatggtatcagctgactgcggcaacatacttgtaa

SEQ ID NO: 64 - DNA, 1326 bp, Homo sapiens;
atggtgccacccaaattgcatgtgcttttctgcctctgcggctgcctggctgtggtttatccttttgactggcaatacataaatcctgttgcccatatgaaatcatcagcatgggtcaacaaaatacaagtactgatggctgctgcaagctttggccaaactaaaatcccccggggaaatgggccttattccgttggttgtacagacttaatgtttgatcacactaataagggcaccttcttgcgtttatattatccatcccaagataatgatcgccttgacaccctttggatcccaaataaagaatatttttggggtcttagcaaatttcttggaacacactggcttatgggcaacattttgaggttactctttggttcaatgacaactcctgcaaactggaattcccctctgaggcctggtgaaaaatatccacttgttgttttttctcatggtcttggggcattcaggacactttattctgctattggcattgacctggcatctcatgggtttatagttgctgctgtagaacacagagatagatctgcatctgcaacttactatttcaaggaccaatctgctgcagaaataggggacaagtcttggctctaccttagaaccctgaaacaagaggaggagacacatatacgaaatgagcaggtacggcaaagagcaaaagaatgttcccaagctctcagtctgattcttgacattgatcatggaaagccagtgaagaatgcattagatttaaagtttgatatggaacaactgaaggactctattgatagggaaaaaatagcagtaattggacattcttttggtggagcaacggttattcagactcttagtgaagatcagagattcagatgtggtattgccctggatgcatggatgtttccactgggtgatgaagtatattccagaattcctcagcccctcttttttatcaactctgaatatttccaatatcctgctaatatcataaaaatgaaaaaatgctactcacctgataaagaaagaaagatgattacaatcaggggttcagtccaccagaattttgctgacttcacttttgcaactggcaaaataattggacacatgctcaaattaaagggagacatagattcaaatgtagctattgatcttagcaacaaagcttcattagcattcttacaaaagcatttaggacttcataaagattttgatcagtgggactgcttgattgaaggagatgatgagaatcttattccagggaccaacattaacacaaccaatcaacacatcatgttacagaactcttcaggaatagagaaatacaattag

SEQ ID NO: 65 - DNA, 4233 bp, Homo sapiens;
atggcggacaccgacctgttcatggaatgtgaggaggaggagttggagccatggcagaaaatcagtgatgtcattgaggactctgtagttgaagattataattcagtggataaaactaccacagtttctgtgagccagcagccagtctcggctccagtgcccatcgctgcccatgcttctgttgctgggcacctctctacatccaccaccgttagtagcagcggggcacagaacagcgacagtacaaagaagactcttgtcacactaattgccaacaacaatgctggcaatcctttggtccagcaaggtggacagccactcatcctgacccagaatccagccccaggtctgggcacaatggttactcaaccagtattgaggcctgttcaggtcatgcagaatgccaatcatgtgactagttcccctgtggcctcacaaccaatatttatcactacgcagggatttcctgtaaggaatgtccggcctgtacaaaatgcaatgaatcaggttgggattgtgctgaacgtacagcaaggccaaacggttagaccaattacactagttccagccccaggtacccagtttgttaagccgacagttggagttccacaagtgttctcccagatgacccctgtgaggccaggctccacaatgcctgtgaggcccaccaccaacaccttcaccaccgtcatcccggccactcttaccattcgaagcaccgtcccacagtcccagtcccagcagaccaagtccactcccagcacttctaccactcccactgccacacagccaacctcactggggcaactagctgttcagtctccaggccagtcaaaccagaccacgaatcccaagctagctccctccttcccctctccacctgcagtgagcattgccagctttgtcactgtgaagcgacctggtgttacaggcgaaaatagcaatgaagtggccaaattggtgaatacccttaacaccatcccttccctgggccagagtcctgggccagtggtggtgtccaacaacagctctgctcatggctctcaaagaaccagcggacctgagtcttcaatgaaagtgacctcttccatcccagtatttgacctccaggatggtggacggaaaatatgtccacgatgtaatgctcaatttcgtgttactgaagctttgagaggtcacatgtgttactgttgcccagaaatggttgaataccagaagaaaggaaagtccctggattcagaacccagtgtcccatcagcagcaaagcccccatcccctgagaaaacagctcctgttgcttccacaccctcttctacacctattcctgctctgtcaccgcctaccaaagtaccagaaccaaatgagaacgtgggcgatgccgtccagaccaaactcattatgcttgtagatgacttctactatggacgggatggtggcaaagtagcccagctcacaaatttccctaaggtcgccacatctttccgatgcccacattgtaccaaaaggctaaaaaacaatattcgattcatgaaccatatgaaacaccacgtagaactcgatcagcagaacggtgaggtagatggtcacactatctgccagcactgttaccgccagttttccactcccttccagcttcagtgccacttggaaaatgttcatagtccctatgaatctactaccaagtgcaagatctgtgaatgggcgtttgaaagtgagccactatttctccagcatatgaaggatactcataagcctggagagatgccttatgtttgccaggtgtgtcaatatcgctcctcactctactctgaggtagatgtccattttcggatgatccatgaggatacccggcatctgctctgcccttattgcctgaaggtcttcaaaaatggcaatgcattccaacagcattacatgaggcaccagaagagaaatgtttatcactgcaacaaatgccggctgcagtttctctttgccaaggacaaaattgaacacaagcttcaacaccataaaaccttccgtaaacccaagcagctggagggcttgaaaccaggcaccaaggtgacaatccgggcttcccgagggcagccacgaactgttcctgtatcctctaatgatacacctcccagcgccttgcaggaggcagcaccgctgacctcctcaatggaccctctgcctgtcttcctttatccccctgtccagcgcagcatccagaagagagctgttaggaaaatgagtgtcatgggccggcagacatgcctggagtgcagcttcgagatcccagacttccctaatcatttccctacttacgtacactgctctctgtgtcgctatagcacctgctgttctcgagcttatgccaaccacatgatcaacaatcatgttccacggaagagccccaagtatttggctttgtttaaaaattctgtgagtggaatcaagctggcctgcacttcatgtacctttgttacctctgtgggcgatgctatggccaagcatttggtattcaacccctctcacagatccagcagcatcctgccacggggactcacttggatagctcactcaaggcatggccagactcgtgaccgagtgcatgaccggaacgtgaagaatatgtaccctcctccttccttccccactaacaaagctgccactgtgaaatctgcgggggccaccccagctgagcctgaagagctactaactcccttagccccagcactcccatcaccagcctcaactgcaaccccaccaccaacccccactcacccgcaggctttagcccttccaccgctggctacagagggagccgaatgtctgaatgttgatgatcaggatgaagggagcccagtcacccaagaacctgagctagcatcaggtggtggtggtagtggtggagttggcaaaaaggagcagctgtctgtgaagaagcttcgagtagtactgtttgctctatgctgcaatacagaacaggcagctgaacacttccgaaatccccagcgacgtattcgccgttggcttcgacgtttccaggcctcccagggggagaatctagagggcaaatatctgagctttgaggcagaagagaaactggctgagtgggtgctaacccagcgcgaacaacagctacctgtaaatgaggagaccttgttccagaaggccaccaaaataggacgttctttggaaggggggtttaagatctcctatgagtgggctgtgcgtttcatgctgcggcaccacctgactccccatgcccggcgagctgtggcccacaccctacctaaggatgtagcagagaatgcaggactcttcattgattttgtacaacggcagattcacaaccaggacttacccttgtctatgattgtggctattgatgagatctctttgttcctggatacagaggtgctgagcagtgatgatcgaaaggagaatgccctgcagacagtgggcacaggggaaccttggtgtgatgtagtcctagccattctggcagatggcactgtccttcccaccctggttttctacagagggcagatggatcagcctgctaacatgccagactccatattgctagaggcaaaggagagtggctacagtgatgacgagatcatggagctgtggtcaactcgagtgtggcagaagcacacagcttgccagcgcagcaaaggcatgcttgtgatggactgtcatcgcactcacttgtcagaagaggtactggctatgcttagtgcctctagcactttgcctgcagtggtcccagcaggctgtagctccaaaattcagccattagatgtatgcatcaaaagaactgtcaagaacttcctgcataaaaaatggaaggaacaggctcgggaaatggcagatactgcatgtgattctgatgtcctgcttcagctggtgcttgtctggctgggtgaagtgctaggtgtcattggggactgtccagagctagttcagcgctccttcctggtggctagtgttctgcctggccccgatggcaacattaactcacctacaagaaatgctgacatgcaggaggagctaattgcctccctagaggagcaactgaagctgagtggggaacattctgagtcttccactccacgacccagatcatctcctgaagagacaattgagcctgaaagtcttcaccagctctttgagggtgaaagtgagaccgagtctttctatggctttgaagaagctgacctagatctgatggagatttga

SEQ ID NO: 66 - DNA, 2637 bp, Homo sapiens;
atggccaccgccccctcttatcccgccgggctccctggctctcccgggccggggtctcctccgccccccggcggcctagagctgcagtcgccgccaccgctactgccccagatcccggccccgggttccggggtctcctttcacatccagatcgggctgacccgcgagttcgtgctgttgcccgccgcctccgagctggctcatgtgaagcagctggcctgttccatcgtggaccagaagttccctgagtgtggcttctacggcctttacgacaagatcctgcttttcaaacatgaccccacgtcggccaacctcctgcagctggtgcgctcgtccggagacatccaggagggcgacctggtggaggtggtgctgtcggcctcggccaccttcgaggacttccagatccgcccgcacgccctcacggtgcactcctatcgggcgcctgccttctgtgatcactgcggggagatgctcttcggcctagtgcgccagggcctcaagtgcgatggctgcgggctgaactaccacaagcgctgtgccttcagcatccccaacaactgtagtggggcccgcaaacggcgcctgtcatccacgtctctggccagtggccactcggtgcgcctcggcacctccgagtccctgccctgcacggctgaagagctgagccgtagcaccaccgaactcctgcctcgccgtcccccgtcatcctcttcctcctcttctgcctcatcgtatacgggccgccccattgagctggacaagatgctgctctccaaggtcaaggtgccgcacaccttcctcatccacagctatacacggcccaccgtttgccaggcttgcaagaaactcctcaagggcctcttccggcagggcctgcaatgcaaagactgcaagtttaactgtcacaaacgctgcgccacccgcgtccctaatgactgcctgggggaggcccttatcaatggagatgtgccgatggaggaggccaccgatttcagcgaggctgacaagagcgccctcatggatgagtcagaggactccggtgtcatccctggctcccactcagagaatgcgctccacgccagtgaggaggaggaaggcgagggaggcaaggcccagagctccctggggtacatccccctaatgagggtggtgcaatcggtgcgacacacgacgcggaaatccagcaccacgctgcgggagggttgggtggttcattacagcaacaaggacacgctgagaaagcggcactattggcgcctggactgcaagtgtatcacgctcttccagaacaacacgaccaacagatactataaggaaattccgctgtcagaaatcctcacggtggagtccgcccagaacttcagccttgtgccgccgggcaccaacccacactgctttgagatcgtcactgccaatgccacctacttcgtgggcgagatgcctggcgggactccgggtgggccaagtgggcagggggctgaggccgcccggggctgggagacagccatccgccaggccctgatgcccgtcatccttcaggacgcacccagcgccccaggccacgcgccccacagacaagcttctctgagcatctctgtgtccaacagtcagatccaagagaatgtggacattgccactgtctaccagatcttccctgacgaagtgctgggctcagggcagtttggagtggtctatggaggaaaacaccggaagacaggccgggacgtggcagttaaggtcattgacaaactgcgcttccctaccaagcaggagagccagctccggaatgaagtggccattctgcagagcctgcggcatcccgggatcgtgaacctggagtgcatgttcgagacgcctgagaaagtgtttgtggtgatggagaagctgcatggggacatgttggagatgatcctgtccagtgagaagggccggctgcctgagcgcctcaccaagttcctcatcacccagatcctggtggctttgagacaccttcacttcaagaacattgtccactgtgacttgaaaccagaaaacgtgttgctggcatcagcagacccatttcctcaggtgaagctgtgtgactttggctttgctcgcatcatcggcgagaagtcgttccgccgctcagtggtgggcacgccggcctacctggcacccgaggtgctgctcaaccagggctacaaccgctcgctggacatgtggtcagtgggcgtgatcatgtacgtcagcctcagcggcaccttccctttcaacgaggatgaggacatcaatgaccagatccagaacgccgccttcatgtacccggccagcccctggagccacatctcagctggagccattgacctcatcaacaacctgctgcaggtgaagatgcgcaaacgctacagcgtggacaaatctctcagccacccctggttacaggagtaccagacgtggctggacctccgagagctggaggggaagatgggagagcgatacatcacgcatgagagtgacgacgcgcgctgggagcagtttgcagcagagcatccgctgcctgggtctgggctgcccacggacagggatctcggtggggcctgtccaccacaggaccacgacatgcaggggctggcggagcgcatcagtgttctctga

SEQ ID NO: 67 - DNA, 12387 bp, Homo sapiens;
atggcgggctccggagccggtgtgcgttgctccctgctgcggctgcaggagaccttgtccgctgcggaccgctgcggtgctgccctggccggtcatcaactgatccgcggcctggggcaggaatgcgtcctgagcagcagccccgcggtgctggcattacagacatctttagttttttccagagatttcggtttgcttgtatttgtccggaagtcactcaacagtattgaatttcgtgaatgtagagaagaaatcctaaagtttttatgtattttcttagaaaaaatgggccagaagatcgcaccttactctgttgaaattaagaacacttgtaccagtgtttatacaaaagatagagctgctaaatgtaaaattccagccctggaccttcttattaagttacttcagacttttagaagttctagactcatggatgaatttaaaattggagaattatttagtaaattctatggagaacttgcattgaaaaaaaaaataccagatacagttttagaaaaagtatatgagctcctaggattattgggtgaagttcatcctagtgagatgataaataatgcagaaaacctgttccgcgcttttctgggtgaacttaagacccagatgacatcagcagtaagagagcccaaactacctgttctggcaggatgtctgaaggggttgtcctcacttctgtgcaacttcactaagtccatggaagaagatccccagacttcaagggagatttttaattttgtactaaaggcaattcgtcctcagattgatctgaagagatatgctgtgccctcagctggcttgcgcctatttgccctgcatgcatctcagtttagcacctgccttctggacaactacgtgtctctatttgaagtcttgttaaagtggtgtgcccacacaaatgtagaattgaaaaaagctgcactttcagccctggaatcctttctgaaacaggtttctaatatggtggcgaaaaatgcagaaatgcataaaaataaactgcagtactttatggagcagttttatggaatcatcagaaatgtggattcgaacaacaaggagttatctattgctatccgtggatatggactttttgcaggaccgtgcaaggttataaacgcaaaagatgttgacttcatgtacgttgagctcattcagcgctgcaagcagatgttcctcacccagacagacactggtgacgaccgtgtttatcagatgccaagcttcctccagtctgttgcaagcgtcttgctgtaccttgacacagttcctgaggtgtatactccagttctggagcacctcgtggtgatgcagatagacagtttcccacagtacagtccaaaaatgcagctggtgtgttgcagagccatagtgaaggtgttcctagctttggcagcaaaagggccagttctcaggaattgcattagtactgtggtgcatcagggtttaatcagaatatgttctaaaccagtggtccttccaaagggccctgagtctgaatctgaagaccaccgtgcttcaggggaagtcagaactggcaaatggaaggtgcccacatacaaagactacgtggatctcttcagacatctcctgagctctgaccagatgatggattctattttagcagatgaagcatttttctctgtgaattcctccagtgaaagtctgaatcatttactttatgatgaatttgtaaaatccgttttgaagattgttgagaaattggatcttacacttgaaatacagactgttggggaacaagagaatggagatgaggcgcctggtgtttggatgatcccaacttcagatccagcggctaacttgcatccagctaaacctaaagatttttcggctttcattaacctggtggaattttgcagagagattctccctgagaaacaagcagaattttttgaaccatgggtgtactcattttcatatgaattaattttgcaatctacaaggttgcccctcatcagtggtttctacaaattgctttctattacagtaagaaatgccaagaaaataaaatatttcgagggagttagtccaaagagtctgaaacactctcctgaagacccagaaaagtattcttgctttgctttatttgtgaaatttggcaaagaggtggcagttaaaatgaagcagtacaaagatgaacttttggcctcttgtttgacctttcttctgtccttgccacacaacatcattgaactcgatgttagagcctacgttcctgcactgcagatggctttcaaactgggcctgagctatacccccttggcagaagtaggcctgaatgctctagaagaatggtcaatttatattgacagacatgtaatgcagccttattacaaagacattctcccctgcctggatggatacctgaagacttcagccttgtcagatgagaccaagaataactgggaagtgtcagctctttctcgggctgcccagaaaggatttaataaagtggtgttaaagcatctgaagaagacaaagaacctttcatcaaacgaagcaatatccttagaagaaataagaattagagtagtacaaatgcttggatctctaggaggacaaataaacaaaaatcttctgacagtcacgtcctcagatgagatgatgaagagctatgtggcctgggacagagagaagcggctgagctttgcagtgccctttagagagatgaaacctgtcattttcctggatgtgttcctgcctcgagtcacagaattagcgctcacagccagtgacagacaaactaaagttgcagcctgtgaacttttacatagcatggttatgtttatgttgggcaaagccacgcagatgccagaagggggacagggagccccacccatgtaccagctctataagcggacgtttcctgtgctgcttcgacttgcgtgtgatgttgatcaggtgacaaggcaactgtatgagccactagttatgcagctgattcactggttcactaacaacaagaaatttgaaagtcaggatactgttgccttactagaagctatattggatggaattgtggaccctgttgacagtactttaagagatttttgtggtcggtgtattcgagaattccttaaatggtccattaagcaaataacaccacagcagcaggagaagagtccagtaaacaccaaatcgcttttcaagcgactttatagccttgcgcttcaccccaatgctttcaagaggctgggagcatcacttgcctttaataatatctacagggaattcagggaagaagagtctctggtggaacagtttgtgtttgaagccttggtgatatacatggagagtctggccttagcacatgcagatgagaagtccttaggtacaattcaacagtgttgtgatgccattgatcacctatgccgcatcattgaaaagaagcatgtttctttaaataaagcaaagaaacgacgtttgccgcgaggatttccaccttccgcatcattgtgtttattggatctggtcaagtggcttttagctcattgtgggaggccccagacagaatgtcgacacaaatccattgaactcttttataaattcgttcctttattgccaggcaacagatcccctaatttgtggctgaaagatgttctcaaggaagaaggtgtctcttttctcatcaacacctttgaggggggtggctgtggccagccctcgggcatcctggcccagcccaccctcttgtaccttcgggggccattcagcctgcaggccacgctatgctggctggacctgctcctggccgcgttggagtgctacaacacgttcattggcgagagaactgtaggagcgctccaggtcctaggtactgaagcccagtcttcacttttgaaagcagtggctttcttcttagaaagcattgccatgcatgacattatagcagcagaaaagtgctttggcactggggcagcaggtaacagaacaagcccacaagagggagaaaggtacaactacagcaaatgcaccgttgtggtccggattatggagtttaccacgactctgctaaacacctccccggaaggatggaagctcctgaagaaggacttgtgtaatacacacctgatgagagtcctggtgcagacgctgtgtgagcccgcaagcataggtttcaacatcggagacgtccaggttatggctcatcttcctgatgtttgtgtgaatctgatgaaagctctaaagatgtccccatacaaagatatcctagagacccatctgagagagaaaataacagcacagagcattgaggagctttgtgccgtcaacttgtatggccctgacgcgcaagtggacaggagcaggctggctgctgttgtgtctgcctgtaaacagcttcacagagctgggcttctgcataatatattaccgtctcagtccacagatttgcatcattctgttggcacagaacttctttccctggtttataaaggcattgcccctggagatgagagacagtgtctgccttctctagacctcagttgtaagcagctggccagcggacttctggagttagcctttgcttttggaggactgtgtgagcgccttgtgagtcttctcctgaacccagcggtgctgtccacggcgtccttgggcagctcacagggcagcgtcatccacttctcccatggggagtatttctatagcttgttctcagaaacgatcaacacggaattattgaaaaatctggatcttgctgtattggagctcatgcagtcttcagtggataataccaaaatggtgagtgccgttttgaacggcatgttagaccagagcttcagggagcgagcaaaccagaaacaccaaggactgaaacttgcgactacaattctgcaacactggaagaagtgtgattcatggtgggccaaagattcccctctcgaaactaaaatggcagtgctggccttactggcaaaaattttacagattgattcatctgtatcttttaatacaagtcatggttcattccctgaagtctttacaacatatattagtctacttgctgacacaaagctggatctacatttaaagggccaagctgtcactcttcttccattcttcaccagcctcactggaggcagtctggaggaacttagacgtgttctggagcagctcatcgttgctcacttccccatgcagtccagggaatttcctccaggaactccgcggttcaataattatgtggactgcatgaaaaagtttctagatgcattggaattatctcaaagccctatgttgttggaattgatgacagaagttctttgtcgggaacagcagcatgtcatggaagaattatttcaatccagtttcaggaggattgccagaaggggttcatgtgtcacacaagtaggccttctggaaagcgtgtatgaaatgttcaggaaggatgacccccgcctaagtttcacacgccagtcctttgtggaccgctccctcctcactctgctgtggcactgtagcctggatgctttgagagaattcttcagcacaattgtggtggatgccattgatgtgttgaagtccaggtttacaaagctaaatgaatctacctttgatactcaaatcaccaagaagatgggctactataagattctagacgtgatgtattctcgccttcccaaagatgatgttcatgctaaggaatcaaaaattaatcaagttttccatggctcgtgtattacagaaggaaatgaacttacaaagacattgattaaattgtgctacgatgcatttacagagaacatggcaggagagaatcagctgctggagaggagaagactttaccattgtgcagcatacaactgcgccatatctgtcatctgctgtgtcttcaatgagttaaaattttaccaaggttttctgtttagtgaaaaaccagaaaagaacttgcttatttttgaaaatctgatcgacctgaagcgccgctataattttcctgtagaagttgaggttcctatggaaagaaagaaaaagtacattgaaattaggaaagaagccagagaagcagcaaatggggattcagatggtccttcctatatgtcttccctgtcatatttggcagacagtaccctgagtgaggaaatgagtcaatttgatttctcaaccggagttcagagctattcatacagctcccaagaccctagacctgccactggtcgttttcggagacgggagcagcgggaccccacggtgcatgatgatgtgctggagctggagatggacgagctcaatcggcatgagtgcatggcgcccctgacggccctggtcaagcacatgcacagaagcctgggcccgcctcaaggagaagaggattcagtgccaagagatcttccttcttggatgaaattcctccatggcaaactgggaaatccaatagtaccattaaatatccgtctcttcttagccaagcttgttattaatacagaagaggtctttcgcccttacgcgaagcactggcttagccccttgctgcagctggctgcttctgaaaacaatggaggagaaggaattcactacatggtggttgagatagtggccactattctttcatggacaggcttggccactccaacaggggtccctaaagatgaagtgttagcaaatcgattgcttaatttcctaatgaaacatgtctttcatccaaaaagagctgtgtttagacacaaccttgaaattataaagacccttgtcgagtgctggaaggattgtttatccatcccttataggttaatatttgaaaagttttccggtaaagatcctaattctaaagacaactcagtagggattcaattgctaggcatcgtgatggccaatgacctgcctccctatgacccacagtgtggcatccagagtagcgaatacttccaggctttggtgaataatatgtcctttgtaagatataaagaagtgtatgccgctgcagcagaagttctaggacttatacttcgatatgttatggagagaaaaaacatactggaggagtctctgtgtgaactggttgcgaaacaattgaagcaacatcagaatactatggaggacaagtttattgtgtgcttgaacaaagtgaccaagagcttccctcctcttgcagacaggttcatgaatgctgtgttctttctgctgccaaaatttcatggagtgttgaaaacactctgtctggaggtggtactttgtcgtgtggagggaatgacagagctgtacttccagttaaagagcaaggacttcgttcaagtcatgagacatagagatgatgaaagacaaaaagtatgtttggacataatttataagatgatgccaaagttaaaaccagtagaactccgagaacttctgaaccccgttgtggaattcgtttcccatccttctacaacatgtagggaacaaatgtataatattctcatgtggattcatgataattacagagatccagaaagtgagacagataatgactcccaggaaatatttaagttggcaaaagatgtgctgattcaaggattgatcgatgagaaccctggacttcaattaattattcgaaatttctggagccatgaaactaggttaccttcaaataccttggaccggttgctggcactaaattccttatattctcctaagatagaagtgcactttttaagtttagcaacaaattttctgctcgaaatgaccagcatgagcccagattatccaaaccccatgttcgagcatcctctgtcagaatgcgaatttcaggaatataccattgattctgattggcgtttccgaagtactgttctcactccgatgtttgtggagacccaggcctcccagggcactctccagacccgtacccaggaagggtccctctcagctcgctggccagtggcagggcagataagggccacccagcagcagcatgacttcacactgacacagactgcagatggaagaagctcatttgattggctgaccgggagcagcactgacccgctggtcgaccacaccagtccctcatctgactccttgctgtttgcccacaagaggagtgaaaggttacagagagcacccttgaagtcagtggggcctgattttgggaaaaaaaggctgggccttccaggggacgaggtggataacaaagtgaaaggtgcggccggccggacggacctactacgactgcgcagacggtttatgagggaccaggagaagctcagtttgatgtatgccagaaaaggcgttgctgagcaaaaacgagagaaggaaatcaagagtgagttaaaaatgaagcaggatgcccaggtcgttctgtacagaagctaccggcacggagaccttcctgacattcagatcaagcacagcagcctcatcaccccgttacaggccgtggcccagagggacccaataattgcaaaacagctctttagcagcttgttttctggaattttgaaagagatggataaatttaagacactgtctgaaaaaaacaacatcactcaaaagttgcttcaagacttcaatcgttttcttaataccaccttctctttctttccaccctttgtctcttgtattcaggacattagctgtcagcacgcagccctgctgagcctcgacccagcggctgttagcgctggttgcctggccagcctacagcagcccgtgggcatccgcctgctagaggaggctctgctccgcctgctgcctgctgagctgcctgccaagcgagtccgtgggaaggcccgcctccctcctgatgtcctcagatgggtggagcttgctaagctgtatagatcaattggagaatacgacgtcctccgtgggatttttaccagtgagataggaacaaagcaaatcactcagagtgcattattagcagaagccagaagtgattattctgaagctgctaagcagtatgatgaggctctcaataaacaagactgggtagatggtgagcccacagaagccgagaaggatttttgggaacttgcatcccttgactgttacaaccaccttgctgagtggaaatcacttgaatactgttctacagccagtatagacagtgagaaccccccagacctaaataaaatctggagtgaaccattttatcaggaaacatatctaccttacatgatccgcagcaagctgaagctgctgctccagggagaggctgaccagtccctgctgacatttattgacaaagctatgcacggggagctccagaaggcgattctagagcttcattacagtcaagagctgagtctgctttacctcctgcaagatgatgttgacagagccaaatattacattcaaaatggcattcagagttttatgcagaattattctagtattgatgtcctcttacaccaaagtagactcaccaaattgcagtctgtacaggctttaacagaaattcaggagttcatcagctttataagcaaacaaggcaatttatcatctcaagttccccttaagagacttctgaacacctggacaaacagatatccagatgctaaaatggacccaatgaacatctgggatgacatcatcacaaatcgatgtttctttctcagcaaaatagaggagaagcttacccctcttccagaagataatagtatgaatgtggatcaagatggagaccccagtgacaggatggaagtgcaagagcaggaagaagatatcagctccctgatcaggagttgcaagttttccatgaaaatgaagatgatagacagtgcccggaagcagaacaatttctcacttgctatgaaactactgaaggagctgcataaagagtcaaaaaccagagacgattggctggtgagctgggtgcagagctactgccgcctgagccactgccggagccggtcccagggctgctctgagcaggtgctcactgtgctgaaaacagtctctttgttggatgagaacaacgtgtcaagctacttaagcaaaaatattctggctttccgtgaccagaacattctcttgggtacaacttacaggatcatagcgaatgctctcagcagtgagccagcctgccttgctgaaatcgaggaggacaaggctagaagaatcttagagctttctggatccagttcagaggattcagagaaggtgatcgcgggtctgtaccagagagcattccagcacctctctgaggctgtgcaggcggctgaggaggaggcccagcctccctcctggagctgtgggcctgcagctggggtgattgatgcttacatgacgctggcagatttctgtgaccaacagctgcgcaaggaggaagagaatgcatcagttattgattctgcagaactgcaggcgtatccagcacttgtggtggagaaaatgttgaaagctttaaaattaaattccaatgaagccagattgaagtttcctagattacttcagattatagaacggtatccagaggagactttgagcctcatgacaaaagagatctcttccgttccctgctggcagttcatcagctggatcagccacatggtggccttactggacaaagaccaagccgttgctgttcagcactctgtggaagaaatcactgataactacccgcaggctattgtttatcccttcatcataagcagcgaaagctattccttcaaggatacttctactggtcataagaataaggagtttgtggcaaggattaaaagtaagttggatcaaggaggagtgattcaagattttattaatgccttagatcagctctctaatcctgaactgctctttaaggattggagcaatgatgtaagagctgaactagcaaaaacccctgtaaataaaaaaaacattgaaaaaatgtatgaaagaatgtatgcagccttgggtgacccaaaggctccaggcctgggggcctttagaaggaagtttattcagacttttggaaaagaatttgataaacattttgggaaaggaggttctaaactactgagaatgaagctcagtgacttcaacgacattaccaacatgctacttttaaaaatgaacaaagactcaaagccccctgggaatctgaaagaatgttcaccctggatgagcgacttcaaagtggagttcctgagaaatgagctggagattcccggtcagtatgacggtaggggaaagccattgccagagtaccacgtgcgaatcgccgggtttgatgagcgggtgacagtcatggcgtctctgcgaaggcccaagcgcatcatcatccgtggccatgacgagagggaacaccctttcctggtgaagggtggcgaggacctgcggcaggaccagcgcgtggagcagctcttccaggtcatgaatgggatcctggcccaagactccgcctgcagccagagggccctgcagctgaggacctatagcgttgtgcccatgacctccaggttaggattaattgagtggcttgaaaatactgttaccttgaaggaccttcttttgaacaccatgtcccaagaggagaaggcggcttacctgagtgatcccagggcaccgccgtgtgaatataaagattggctgacaaaaatgtcaggaaaacatgatgttggagcttacatgctaatgtataagggcgctaatcgtactgaaacagtcacgtcttttagaaaacgagaaagtaaagtgcctgctgatctcttaaagcgggccttcgtgaggatgagtacaagccctgaggctttcctggcgctccgctcccacttcgccagctctcacgctctgatatgcatcagccactggatcctcgggattggagacagacatctgaacaactttatggtggccatggagactggcggcgtgatcgggatcgactttgggcatgcgtttggatccgctacacagtttctgccagtccctgagttgatgccttttcggctaactcgccagtttatcaatctgatgttaccaatgaaagaaacgggccttatgtacagcatcatggtacacgcactccgggccttccgctcagaccctggcctgctcaccaacaccatggatgtgtttgtcaaggagccctcctttgattggaaaaattttgaacagaaaatgctgaaaaaaggagggtcatggattcaagaaataaatgttgctgaaaaaaattggtacccccgacagaaaatatgttacgctaagagaaagttagcaggtgccaatccagcagtcattacttgtgatgagctactcctgggtcatgagaaggcccctgccttcagagactatgtggctgtggcacgaggaagcaaagatcacaacattcgtgcccaagaaccagagagtgggctttcagaagagactcaagtgaagtgcctgatggaccaggcaacagaccccaacatccttggcagaacctgggaaggatgggagccctggatgtga

SEQ ID NO: 68 - DNA, 1641 bp, Homo sapiens;
atggctaacaacagccccgcgctgacaggcaactcgcagccgcagcaccaggcggctgcagctgcggctcagcaacagcagcagtgcggcggcggcggcgctaccaagccggcggtctccggcaagcagggcaatgtgctcccgctctggggcaacgagaagaccatgaacctcaaccccatgatcctgaccaacatcctgtcgtcgccttacttcaaagtacagctctacgagctcaagacctaccacgaggtggtggacgagatctactttaaggtcacgcacgttgaaccatgggagaaaggaagcaggaaaacagcgggccagacagggatgtgcggaggggttcgaggtgttggaacaggaggaattgtttctacagcattttgcctgttatacaaattatttaccctgaagttaactcgaaagcaagtgatgggtcttataacacacacagactctccatatattagagcgcttggatttatgtatataagatatacacagccccctacagatctgtgggactggtttgaatccttccttgatgatgaagaggacctagatgtgaaggctggtggaggctgtgtaatgaccattggagaaatgctacgatcttttctcacaaaactggagtggttttctaccttgtttccaagaattccagttccagttcaaaagaatattgatcaacagattaaaacccgacctagaaaaatcaagaaagatgggaaggaaggtgctgaggaaatagacagacatgttgaacgcagacgttcaaggtctccaaggagatctctgagtccacggaggtccccaagaaggtcaagaagtagaagtcatcatcgggagggccatgggtcttctagttttgacagagaattagaaagagagaaagaacgccagcgactagagcgtgaagccaaagaaagggagaaagaacggcgaagatcccgaagtattgaccgggggttagaacgcaggcgcagcagaagtagggaaaggcatagaagtcgcagtcgaagtcgtgataggaaaggggatagaagggacagggatcgagaaagagagaaagaaaatgagagaggtagaagacgagatcgtgactatgataaggaaagaggaaatgaacgagaaaaagagagagagcgatcaagagaaaggtccaaggaacagagaagtaggggagaggtagaagagaagaaacataaagaagacaaagatgataggcggcacagagatgacaaaagagattccaagaaagagaaaaaacacagtagaagcagaagcagagaaaggaaacacagaagtaggagtcgaagtagaaatgcagggaaacgaagtagaagtagaagcaaagagaaatcaagtaaacataaaaatgaaagtaaagaaaaatcaaataaacgaagtcgaagtggcagtcaaggaagaactgacagtgttgaaaaatcaaaaaaacgggaacatagtcccagcaaagaaaaatctagaaagcgtagtagaagcaaagaacgttcccacaaacgagatcacagtgatagtaaggaccagtcagacaaacatgatcgtcgaaggagccaaagtatagaacaagagagccaagaaaaacagcataaaaacaaagatgagactgtgtga

SEQ ID NO: 69 - DNA, 1152 bp, Homo sapiens;
atggcagggattccagggctcctcttccttctcttctttctgctctgtgctgttgggcaagtgagcccttacagtgccccctggaaacccacttggcctgcataccgcctccctgtcgtcttgccccagtctaccctcaatttagccaagccagactttggagccgaagccaaattagaagtatcttcttcatgtggaccccagtgtcataagggaactccactgcccacttacgaagaggccaagcaatatctgtcttatgaaacgctctatgccaatggcagccgcacagagacgcaggtgggcatctacatcctcagcagtagtggagatggggcccaacaccgagactcagggtcttcaggaaagtctcgaaggaagcggcagatttatggctatgacagcaggttcagcatttttgggaaggacttcctgctcaactaccctttctcaacatcagtgaagttatccacgggctgcaccggcaccctggtggcagagaagcatgtcctcacagctgcccactgcatacacgatggaaaaacctatgtgaaaggaacccagaagcttcgagtgggcttcctaaagcccaagtttaaagatggtggtcgaggggccaacgactccacttcagccatgcccgagcagatgaaatttcagtggatccgggtgaaacgcacccatgtgcccaagggttggatcaagggcaatgccaatgacatcggcatggattatgattatgccctcctggaactcaaaaagccccacaagagaaaatttatgaagattggggtgagccctcctgctaagcagctgccagggggcagaattcacttctctggttatgacaatgaccgaccaggcaatttggtgtatcgcttctgtgacgtcaaagacgagacctatgacttgctctaccagcaatgcgatgcccagccaggggccagcgggtctggggtctatgtgaggatgtggaagagacagcagcagaagtgggagcgaaaaattattggcattttttcagggcaccagtgggtggacatgaatggttccccacaggatttcaacgtggctgtcagaatcactcctctcaaatatgcccagatttgctattggattaaaggaaactacctggattgtagggaggggtga

SEQ ID NO: 70 - DNA, 1479 bp, Homo sapiens;
atggcaaataactacaagaaaattgttctactgaaaggattagaggtcatcaatgattatcattttagaattgttaagtccttactgagtaacgatttaaaacttaatccaaaaatgaaagaagagtatgacaaaattcagattgctgacttgatggaggaaaagttcccaggtgatgccggtttgggcaaactaatagaattcttcaaagaaataccaacactgggagaccttgctgaaactcttaaaagagaaaagttaaaagttgcaaataaaattgaatccattccagtcaaaggaataatcccatctaaaaagacgaaacagaaagaagtgtatcctgctacacctgcatgcaccccaagcaaccgtctcacagctaaaggagcagaggagactcttggacctcagaaaagaaaaaaaccatctgaagaagagactggaaccaaaaggagtaagatgtccaaagagcagactcggccttcctgctctgcaggagccagcacgtccacagccatgggccgttccccacctccccagacctcatcatcagctccacccaacacttcctcaactgagagcctaaaaccattggccaaccgtcacgcaactgccagtaaaaatattttccgagaagacccaataatcgcgatggtactaaatgcaacaaaagtatttaaatatgaatcctcagaaaatgagcaaagaagaatgtttcatgctacagtggctacgcagacacagttctttcatgtgaaggttttaaacatcaacttgaagaggaaattcattaaaaagagaatcatcattatatcaaattattccaaacgtaatagtctcctagaggtgaatgaagcctcttctgtatctgaagctggtcctgaccaaacgtttgaggttccaaaggacatcatcagaagagcaaagaaaattccgaagatcaatattcttcacaaacaaacttcaggatatattgtatatggattatttatgctacatacgaaaattgtaaataggaagacgacaatctatgaaattcaggataaaacaggaagtatggctgtagtaggaaaaggagaatgccacaatatcccctgtgaaaaaggagataagcttcgactcttctgctttcgactgagaaagagggaaaatatgtcaaaactgatgtcagaaatgcatagtttcatccagatacagaaaaatacaaaccagagaagccatgactccaggagcatggcactaccccaggaacagagtcagcatccaaaaccttcagaggccagcacaaccctacctgaaagccatctcaagactcctcagatgccaccaacaaccccatccagcagttccttcaccaagaaggatgaaacccacccaggagcacagtcatcgcctgcaaactttagaatcacctcaccaactgtggcccctcctctttcttctgacacttccaccaaccgccatccagcagttccttaa

SEQ ID NO: 71 - DNA, 2331 bp, Homo sapiens;
atgaataattccctagagaacaccatctcctttgaagagtacatccgagtaaaggcacggtctgtcccgcaacacaggatgaaggaatttctggactcactggcctctaaggggccagaagcccttcaggagttccagcagacagccaccactaccatggtgtaccaacagggtgggaactgcatatacacagacagcactgaagtggctgggtctttgcttgaacttgcctgtccagtcaccaccagtgttcagccacaaacccagcaagaacagcagatccaggttcagcagccgcagcaggttcaggtccaggtgcaggtacagcagtctccgcaacaggtctcggctcagctctccccacaactcaccgttcaccagcctactgagcaacccatccaggtccaggtgcagatccaaggccaggcaccacagtcagcagccccctccattcagaccccgtctctgcagagtcccagtccctcgcagctgcaagcagctcagatccaggtgcagcacgtgcaagcagcccagcagatccaggctgcagaaatcccggaggagcacatcccacatcagcaaatccaggctcagctggtggctggccagtctcttgctggtggtcagcagatccaaatccagaccgtgggtgccctttccccaccaccatcccagcagggctcaccccgggaaggggagcggcgggttggcacggccagtgtcctccaaccagtgaagaagcgcaaagtggacatgcccatcactgtgtcctacgccatctcagggcagccggtggccaccgtgctggccattccacagggccagcagcagagttatgtgtctttgaggccagacttactgacagtagacagtgcccacctgtacagtgccactgggaccattactagccctacaggagaaacctggaccatccctgtttattctgcccagccccggggggaccctcagcagcagagcattacccacattgccattccccaggaagcctacaacgcagttcacgtcagtggctcacccacagccctggcagctgttaagctggaggatgacaaggagaagatggtgggcaccacatctgtagtgaaaaactcccatgaagaggtagtgcagacccttgcaaactctctctttccagcacagttcatgaatggcaacatccacattccagtggctgtgcaggctgtggcaggcacgtaccagaatacggctcaaactgtccatatatgggacccccaacagcagccgcagcagcaaactccccaggaacagacaccaccaccacagcagcagcagcagcaactccaagttacttgttcagctcaaactgtccaggttgctgaagttgaaccacagtcacagccacagccttccccagaacttctgcttccaaattctttgaagccagaagaagggcttgaagtatggaaaaactgggcccagaccaagaatgctgaactagagaaggatgctcagaacagattggcacccattgggaggcgccaactgctgcgattccaggaagatctcatctcctctgctgtggcagagttgaattatgggctctgtctaatgacacgggaagctcgaaatggagaaggtgaaccctatgacccagatgtgctctactatattttcctgtgtattcaaaagtatctttttgaaaatggaagggtagatgacattttctccgatctttattatgttcggttcacggagtggctacatgaagttctgaaggatgttcagccccgggtcactccacttggctatgtcttgcccagccacgtgactgaggagatgctatgggagtgcaagcagcttggggctcactccccctccaccttgctgaccaccctcatgttctttaataccaagtacttcctattgaagacagtggaccagcacatgaagctggccttctccaaggtcttgcgacagacaaagaagaacccctctaatcccaaggataaaagcacgagtatccggtacttgaaggcccttggaatacaccagactggccagaaagttacagatgacatgtatgcagaacagacggaaaatccagagaatccattgagatgtcccatcaagctctatgatttctacctcttcaaatgcccccagagtgtgaaaggccggaatgacaccttttacctgacacctgagccagtggtggcccccaacagcccaatctggtactcagtccagcctatcagcagagagcagatgggacaaatgctgacgcggatcctggtgataagagaaattcaggaggccatcgcagtggccaatgcaagcactatgcactga

SEQ ID NO: 72 - DNA, 678 bp, Homo sapiens;
atggcgggcggaggagccggggaccccggcctgggggcggccgccgccccagcgcccgagacccgcgagcacctcttcaaggtgctggtgatcggcgagcttggcgtgggcaagaccagcatcatcaagcgctacgtccaccagctcttctcccagcactaccgggccaccatcggggtggacttcgccctcaaggtcctcaactgggacagcaggactctggtgcgcctgcagctgtgggacatcgcggggcaggagcgatttggcaacatgacccgagtatactacaaggaagctgttggtgcttttgtagtctttgatatatcaagaagttccacatttgaggcagtcttaaaatggaaaagtgatctggatagtaaagttcatcttccaaatggcagccctatccctgctgtcctcttggctaacaaatgtgaccagaacaaggacagtagccagagtccttcccaggtggaccaattctgcaaagaacatggctttgccggatggtttgaaacctctgcaaaggataacataaacatagaggaagctgcccggttcctagtggagaagattcttgtaaaccaccaaagctttcctaatgaagaaaacgatgtggacaaaattaagctagatcaagagaccttgagagcagagaacaaatcccagtgttgctga

SEQ ID NO: 73 - DNA, 2934 bp, Homo sapiens;
atgaggactgcggggcgggaccctgtgccgcggcggagtccaagatggcggcgtgcggttccgctgtgtgaaacgagcgcggggcggcgggttactcagctccgcggagacgacctccgacgacccgcaacaatgaagggaaaagagcgctcgccagtgaaggccaaacgctcccgtggtggtgaggactcgacttcccgcggtgagcggagcaagaagttagggggctctggtggcagcaatgggagcagcagcggaaagaccgatagcggcggtgggtcgcggcggagtctccacctggacaagtccagcagtcgaggtggcagccgcgagtatgataccggtgggggcagctccagtagccgcttgcatagttatagctccccgagcaccaaaaattcttcgggcgggggcgaatcgcgcagcagctcccggggtggaggcggggagtcacgttcctctggggccgcctcctcagctcccggcggcggggacggcgcggaatacaagactctgaagataagcgagttggggtcccagcttagtgacgaagcggtggaggacggcctgtttcatgagttcaaacgcttcggtgatgtaagtgtgaaaatcagtcatctgtcgggttctggcagcggggatgagcgggtagcctttgtgaacttccggcggccagaggacgcgcgggcggccaagcatgccagaggccgcctggtgctctatgaccggcctctgaagatagaagctgtgtatgtgagccggcgccgcagccgctcccctttagacaaagatacttatcctccatcagccagtgtggtcggggcctctgtaggtggtcaccggcacccccctggaggtggtggaggccagagatcactttcccctggtggcgctgctttgggatacagagactaccggctgcagcagttggctcttggccgcctgccccctccacctccgccaccattgcctcgagacctggagagagaaagagactacccgttctatgagagagtgcgccctgcatacagtcttgagccaagggtgggagctggagcaggtgctgctcctttcagagaagtggatgagatttcacccgaggatgatcagcgagctaaccggacgctcttcttgggcaacctagacatcactgtaacggagagtgatttaagaagggcgtttgatcgctttggagtcatcacagaagtagatatcaagaggccttctcgcggccagactagtacttacggctttctcaaatttgagaacttagatatgtctcaccgggccaaattagcaatgtctggcaaaattataattcggaatcctatcaaaattggttatggtaaagctacacccaccacccgcctctgggtgggaggcctgggaccttgggttcctcttgctgccctggcacgagaatttgatcgatttggcaccatacgcaccatagactaccgaaaaggtgatagttgggcatatatccagtatgaaagcctggatgcagcgcatgctgcctggacccatatgcggggcttcccacttggtggcccagatcgacgccttagagtagactttgccgacaccgaacatcgttaccagcagcagtatctgcagcctctgcccttgactcattatgagctggtgacagatgcttttggacatcgggcaccagaccctttgaggggtgctcgggataggacaccacccttactatacagagatcgtgatagggacctttatcctgactctgattgggtgccacccccacccccagtccgagaacgcagcactcggactgcagctacttctgtgcctgcttacgagccactggatagcctagatcgcaggcgggatggttggtccttggaccgggacagaggtgatcgagatctgcccagcagcagagaccagcctaggaagcgaaggctgcctgaggagagtggaggacgtcatctggataggtctcctgagagtgaccgcccacgaaaacgtcactgcgctccttctcctgaccgcagtccagaattgagcagtagccgggatcgttacaacagcgacaatgatcgatcttcccgtcttctcttggaaaggccctctccaatcagagacagacgaggtagtttggagaagagccagggtgacaagcgagaccgtaaaaactctgcatcagctgaacgagataggaagcaccggacaactgctcccactgagggaaaaagccctctgaaaaaagaagaccgctctgatgggagtgcacctagcaccagcactgcttcctccaagctgaagtccccgtcccagaaacaggatggggggacagcccctgtggcatcagcctctcccaaactctgtttggcctggcagggcatgcttctactgaagaacagcaactttccttccaacatgcatctgttgcagggtgacctccaagtggctagtagtcttcttgtggagggttcaactggaggcaaagtggcccagctcaagatcactcagcgtctccgtttggaccagcccaagttggatgaagtaactcgacgcatcaaagtagcagggcccaatggttatgccattcttttggctgtgcctggaagttctgacagccggtcctcctcttcctcagctgcatcagacactgccacttctactcagaggccacttaggaaccttgtgtcctatttaaagcaaaagcaggcagccggggtgatcagcctccctgtggggggcaacaaagacaaggaaaacaccggggtccttcatgccttcccaccttgtgagttctcccagcagttcctggattcccctgccaaggcactggccaaatctgaagaagattacctggtcatgatcattgtccgtgggtttggttttcagataggagttaggtatgagaacaagaagagagaaaacttggcgctgaccctgttatag

SEQ ID NO: 74 - DNA, 1272 bp, Homo sapiens;
atggcatctgatgactttgacatagtgattgaggccatgctggaagctccctataaaaaagaagaggatgagcaacaaaggaaagaagttaaaaaggattatcctagcaataccaccagcagcaccagcaacagtggcaatgagaccagtggaagcagcaccatcggggagacaagcaatcgtagtcgagatcgggatcggtatagacggagaaatagtcggagccgaagtccaggtcggcagtgtcgtcaccgtagccgtagctgggatcgtcgacatggtagtgagtcgcgaagtcgggaccatcgtcgtgaggatcgtgtgcattacaggagtcctccacttgccactggttataggtatggacacagtaagagtcctcatttcagagagaagagcccagtcagggagccagttgataatctgagtcctgaggagcgtgatgcccgcacagttttctgtatgcagttagctgcccgaattcggcctcgagatctggaggactttttctctgctgtaggcaaggttcgcgatgtacgtatcatctcagatcggaactcacgtcgttctaagggcattgcctacgtggaattctgtgaaatccagtctgtgccactggccattgggctgactgggcagcggttgctgggagtgcctatcattgtacaggcttcacaggcagagaaaaaccgactggcagccatggccaacaacctgcaaaagggcaatggtggaccaatgcgcctctatgtgggttccctgcacttcaatatcactgaagacatgctccggggcatctttgagccctttggtaaaattgataatattgtcctgatgaaggactcagatacaggccgctctaaaggttatggtttcatcacgttctctgattctgagtgtgcccggcgggccctggaacagttgaatgggtttgagcttgctggtcgacctatgagggttggccatgtgactgagcgactggatggtggcacagacatcacttttcctgatggggaccaggagctggatctgggatcagcaggtggacgttttcagctcatggcaaaactggcagaaggcgctggaatccaactgccaagcactgctgctgctgctgctgccgccgccgcccaggctgctgccttgcaactgaatggagcagttcccttgggggccctgaatccagcagctctgactgctctgagtccagccctgaaccttgcctcccagtgtttccagctctccagcctctttaccccccagaccatgtaa

SEQ ID NO: 75 - DNA, 3444 bp, Homo sapiens;
atggacattcggaaattctttggagtaataccaagtggaaagaaacttgtaagtgaaacagtaaagaagaatgagaaaacaaagtctgatgaagaaactttaaaagcaaagaaaggaataaaggaaatcaaggtaaatagctcccgtaaagaggatgacttcaaacaaaagcaaccaagcaagaaaaagaggatcatctatgattcagattcagagtcagaggagacgttgcaggtaaaaaatgccaaaaagccaccagaaaaactgccagtatcttctaaacctggtaaaatttcacggcaggatcctgttacatacatttcagaaacagatgaagaagatgactttatgtgtaagaaggcggcctctaaatcaaaagagaatggaagatctacaaatagtcatcttggaacatcaaacatgaaaaagaatgaagaaaacactaagaccaagaataagcctttatcaccaataaaacttacacccacatcagtacttgattattttggaactggaagtgtccaaagatctaataagaagatggtggcaagcaaaagaaaagagctttcacaaaatacagatgagtctggattaaatgatgaagccatcgccaagcaattacagcttgatgaagatgcggagctggagaggcagttgcatgaagatgaagagtttgccagaacattagccatgttggatgaagaacccaagaccaaaaaggctcgaaaggacacagaagcgggagaaacgttttcatctgtccaagccaatttaagtaaagcagaaaaacataaatatcctcataaagtaaaaacagcacaagtttcagatgaaagaaagagctacagtcctaggaagcaaagtaaatatgaaagttcaaaagaatctcagcaacattccaagtcatcagctgacaaaataggagaagtctcttctcccaaggccagttctaagctggcaattatgaaaagaaaagaagagagctcttataaagaaatagagcctgtggcctcaaaaagaaaagaaaatgccattaaattgaaaggagagacaaaaactcctaagaaaaccaaaagttctccagctaaaaaagagtctgtaagtcctgaagattctgaaaagaaacgcactaattatcaagcttatcgaagctacttaaatcgagaaggtcccaaggctctgggctccaaagaaataccaaagggagctgaaaattgcttggaaggccttatatttgtaatcacaggcgtgctggagtctattgaacgagatgaggccaagtctctaattgaacgttatgggggaaaagtaacaggaaatgtcagcaagaaaacaaattatcttgtcatgggtcgtgatagtggacagtccaagagtgataaggccgcagccttggggacaaaaattattgatgaagatggcctgttgaatctgattcggactatgccaggcaagaaatccaagtatgaaatagcagttgaaactgagatgaagaaagagtccaaactggagagaacaccccaaaaaaatgtccaaggaaaaagaaaaattagtccatctaaaaaggaatcagaatctaaaaagagcaggccgacttccaaaagggacagtttggcaaagacaataaaaaaggaaacagatgtgttttggaaaagcctggatttcaaggagcaggtggctgaggagacaagtggtgacagcaaggctaggaatttggctgatgacagcagtgaaaacaaagtggaaaatttgctctgggtggataaatataagccaacctcgctcaagaccataattggacagcaaggtgaccagagctgtgccaacaaactcctacgctggctccgaaactggcaaaagagttcttccgaagataaaaaacacgcaaagtttggtaaattttccggcaaagatgatggctctagttttaaagcagcgttgctgtcaggccctcctggtgttggcaaaaccaccacagcttccctggtgtgtcaggagttgggatacagctacgtggaactgaatgcaagtgacacccggagtaagagcagtttgaaggcgattgttgctgagtcactgaacaataccagcatcaaaggcttttattcaaatggagcagcctcttcagtaagcacgaaacatgctctcatcatggatgaagtagatggcatggcaggcaatgaggataggggaggaattcaggaattaattggcctgataaaacatactaaaattcccattatttgtatgtgcaatgatagaaatcatcccaagattcgctctctggttcattattgttttgatcttcgttttcaaagacctcgggttgaacagattaagggtgctatgatgtctattgcatttaaagaaggtttaaagattccccctccagctatgaatgaaataattttgggagccaatcaagatatcagacaggttttacataatctgagtatgtggtgtgcacgaagtaaagcattaacctatgaccaggccaaagctgattctcacagagccaaaaaggatatcaaaatgggcccatttgatgttgcccggaaagtgtttgcagctggagaggagactgctcacatgtcacttgtggacaagtcagatctcttttttcatgattattcaatagcacccctcttcgtccaggaaaattacatacacgtgaagcctgtagcagcagggggtgacatgaaaaagcacctgatgcttttaagcagagcagcagacagcatatgcgatggtgacctagtggacagccagatccggagtaagcaaaactggagtcttctgcctgcgcaggccatttatgccagtgttcttcctggagagttgatgagggggtacatgacccagtttcccaccttcccaagctggctggggaagcactcgtctacaggcaaacatgatcgtattgttcaggacctggccttgcatatgagtctcagaacttactccagcaaaaggactgtaaacatggattatctgtcgcttctaagggatgcacttgtacagcccttgacctcacaaggagtagacggagtacaggatgttgttgcacttatggacacatattatttgatgaaagaagactttgagaatatcatggaaatcagcagctggggtggcaaacctagtcccttttcaaagctggatcccaaggtgaaagcagccttcacaagagcttacaataaggaagcccaccttactccatactcacttcaagctataaaggcatctagacacagcacaagcccatccctggattcggaatacaatgaagaattaaatgaagatgactctcaatctgatgagaaagaccaagatgctatagaaactgatgccatgatcaagaaaaagacaaaatcttcaaagccttcaaaaccagaaaaagataaggagcccagaaaaggaaaaggaaaaagttcgaagaaatga

SEQ ID NO: 76 - DNA, 453 bp, Homo sapiens;
atggtgctatgctttcctcttcttttactgctgctggttctatggggaccagtgtgtccacttcatgcttggcctaagcgtctcaccaaggctcactggtttgaaattcagcatatacagccaagtcctctccaatgcaacagggcaatgagtggcatcaacaattatacccagcactgtaagcatcaaaatacctttctgcatgactctttccagaatgtggctgctgtctgtgatttgctcagcattgtctgcaaaaatcgtcggcacaactgccaccagagctcaaagcctgtcaacatgactgactgcagactcacttcaggaaagtatccccagtgccgctatagtgctgctgcccagtacaaattcttcattgttgcctgtgacccccctcagaagagcgatcccccctacaagttggttcctgtacacttagatagtattctctaa

SEQ ID NO: 77 - DNA, 1500 bp, Homo sapiens;
atggcatcaaacagcctcttcagcacagtgacaccatgtcagcaaaacttcttttgggatccgagcaccagccggcgcttcagccccccctccagcagcctgcagcccggcaaaatgagcgacgtgagcccggtggtggctgcgcaacagcagcagcaacagcagcagcagcaacagcagcagcagcagcagcaacagcagcagcagcagcaggaggcggcggcggcggctgcggcggcggcggcggctgcggcggcggcagctgcagtgccccggttgcggccgccccacgacaaccgcaccatggtggagatcatcgccgaccacccggccgaactcgtccgcaccgacagccccaacttcctgtgctcggtgctgccctcgcactggcgctgcaacaagaccctgcccgtggccttcaaggtggtagccctcggagaggtaccagatgggactgtggttactgtcatggcgggtaacgatgaaaattattctgctgagctccggaatgcctctgctgttatgaaaaaccaagtagcaaggttcaacgatctgagatttgtgggccggagtggacgaggcaagagtttcaccttgaccataaccgtcttcacaaatcctccccaagtagctacctatcacagagcaattaaagttacagtagatggacctcgggaacccagaaggcacagacagaagcttgatgactctaaacctagtttgttctctgaccgcctcagtgatttagggcgcattcctcatcccagtatgagagtaggtgtcccgcctcagaacccacggccctccctgaactctgcaccaagtccttttaatccacaaggacagagtcagattacagaccccaggcaggcacagtcttccccgccgtggtcctatgaccagtcttacccctcctacctgagccagatgacgtccccgtccatccactctaccaccccgctgtcttccacacggggcactgggcttcctgccatcaccgatgtgcctaggcgcatttcaggtgcttcagaactgggccctttttcagaccccaggcagttcccaagcatttcatccctcactgagagccgcttctccaacccacgaatgcactatccagccacctttacttacaccccgccagtcacctcaggcatgtccctcggtatgtccgccaccactcactaccacacctacctgccaccaccctaccccggctcttcccaaagccagagtggacccttccagaccagcagcactccatatctctactatggcacttcgtcaggatcctatcagtttcccatggtgccggggggagaccggtctccttccagaatgcttccgccatgcaccaccacctcgaatggcagcacgctattaaatccaaatttgcctaaccagaatgatggtgttgacgctgatggaagccacagcagttccccaactgttttgaattctagtggcagaatggatgaatctgtttggcgaccatattga

SEQ ID NO: 78 - DNA, 1824 bp, Homo sapiens;
atgcgtggggcggcgcggctggggcggccgggccggagttgcctcccgggggcccgcggcctgagggccccgccgccgccgccgctgctgcttctgcttgcgctgttgccgctgctgcccgcgcctggcgctgccgccgcccccgccccgcggcccccggagctgcagtcggcttccgcggggcccagcgtgagtctctacctgagcgaggacgaggtgcgccggctgatcggtcttgatgcagaactttattatgtgagaaatgaccttattagtcactacgctctatcctttagtctgttagtacccagtgagacaaatttcctgcacttcacctggcatgcgaagtccaaggttgaatataagctgggattccaagtggacaatgttttggcaatggatatgccccaggtcaacatttctgttcagggggaagttccacgcactttatcagtgtttcgggtagagctttcctgtactggcaaagtagattctgaagttatgatactaatgcagctcaacttgacagtaaattcttcaaaaaattttaccgtcttaaattttaaacgaaggaaaatgtgctacaaaaaacttgaagaagtaaaaacttcagccttggacaaaaacactagcagaactatttatgatcctgtacatgcagctccaaccacttctacgcgtgtgttttatattagtgtaggggtttgttgtgcagtaatatttctcgtagcaataatattagctgttttgcaccttcatagtatgaaaaggattgaactggatgacagcattagtgccagcagtagttcccaagggctgtctcagccatccacccagacgactcagtatctgagagcagacacgcccaacaatgcaactcctatcaccagttatcctaccttgcggatagagaagaacgacttgagaagtgtcactcttttggaggccaaaggcaaggtgaaggatatagcaatatccagagagaggataactctaaaagatgtactccaagaaggtacttttgggcgtattttccatgggattttaatagatgaaaaagatccaaataaagaaaaacaagcatttgtcaaaacagttaaagatcaagcttctgaaattcaggtgacaatgatgctcactgaaagttgtaagctgcgaggtcttcatcacagaaatcttcttcctattactcatgtgtgtatagaagaaggagaaaagcccatggtgatattgccttacatgaattgggggaatcttaaattgtttttacgacagtgcaagttagtagaggccaataatccacaggcaatttctcagcaagacctggtacacatggctattcagattgcctgtggaatgagctacctggccagaagggaagtcatccacaaagacctggctgccaggaactgtgtcattgatgacacacttcaagttaagatcacagacaatgccctctccagagacttgttccccatggactatcactgtctgggggacaatgaaaacaggccagttcgttggatggctcttgaaagtctggttaataacgagttctctagcgctagtgatgtgtgggcctttggagtgacgctgtgggaactcatgactctgggccagactccctacgtggacattgaccccttcgagatggccgcatacctgaaagatggttaccgaatagcccagccaatcaactgtcctgatgaattatttgctgtgatggcctgttgctgggccttagatccagaggagaggcccaagtttcagcagctggtacagtgcctaacagagtttcatgcagccctgggggcctacgtctga

SEQ ID NO: 79 - DNA, 3147 bp, Homo sapiens;
atgggccctccgcggcacccccaggccggcgagatagaagcgggcggtgcgggcggcgggcggcggctacaggtggaaatgagttctcaacagtttcctcggttaggagccccttctaccgggctgagccaggccccttctcagattgcaaacagtggttctgctggattgataaacccagctgctacagtcaatgatgaatctggtcgagattctgaagtcagtgccagggagcacatgagttccagcagctccctccagtcccgggaggagaagcaagagcctgttgtggtaaggccctatccacaggtgcagatgttgtcgacacaccatgctgtcgcatcagccacacctgttgcagtgacagccccgccagcacacctgacgccagcagtgccactttcattttcggagggacttatgaagccgcccccgaagcccaccatgcctagccgtcccattgctcctgctccaccttctaccctgtcacttccccccaaggttccagggcaggttaccgttaccatggagagtagcatccctcaagcttcagccattcctgtggcaacaatcagtggacaacagggccatcccagtaacctgcatcacatcatgactacaaatgtgcaaatgtctatcatccgcagcaatgctcctgggccccctcttcacattggagcttctcatttacctcgaggtgcagctgctgctgctgtgatgtccagttctaaagtaaccacagtcctgaggccgacctcacagctgccaaatgctgctactgctcagccagcagtacagcacatcattcaccaaccaatccagtctcggccacctgtgaccacctccaatgccatccctcctgctgtggtagcaactgtctcagccaccagagctcagtctccagtcatcactacgacagcggcgcatgctactgattcagcacttagtaggccaaccttgtctatccagcatcctccatctgcagcaatcagtattcagcgtcctgcccagtcacgagatgtcacaacaagaatcacactaccatctcaccctgcattagggacgccaaaacagcagcttcatacaatggctcagaaaacaatcttcagtactggcacgccagtggctgcagccacagtagcacctattttggcaaccaacaccattccttcagcgaccacagctggatctgtgtcacacacgcaagctcccacaagtaccattgttaccatgacagtaccctcccattcctcccatgctactgctgtgaccacctcaaacatcccagtcgccaaggtggtgccccagcagatcacgcacacttctcctcggatccagccagactaccctgccgagaggagtagcctgattcccatctccggacatcgggcctctcccaatcctgtggccatggaaacccgaagtgacaacagaccgtctgttcccgttcagttccaatattttttgccaacttaccccccttctgcatacccactggcggcacatacctacaccccaatcaccagttccgtgtccactatccgacagtatccagtttcagctcaggctccaaactctgccatcacagctcagactggtgttggggtagcgtctaccgtccacctaaaccccatgcagttgatgacagtggatgcatcgcatgctcgacatattcaagggatccagccagcacccatcagtacccagggtatccagccggcccccattgggaccccagggatacagcctgcaccacttggcacacagggaattcactcagcaaccccaatcaacacacaagggcttcagcctgcacctatgggtactcagcagcctcagcctgaaggaaagacttcagcagtggtgttggcagatggagccacaattgtggccaaccctattagcaatccattcagtgctgctccagcagcaacaaccgtggtgcagacccacagccagagtgctagcaccaacgctcccgcccagggctcatcgccacggccaagcatactccggaagaaacctgccacagatggtgccaaacccaagtctgaaatccacgtgtctatggccactccggtcactgtgtccatggagactgtatccaatcaaaataatgatcagcctaccattgccgtccctccaactgcccagcagcccccaccgaccattccaactatgattgcagcagccagtcccccgtcacaaccagccgttgccctttcaaccattcctggagcggtccccatcactccacccatcaccaccattgcagctgcaccacctccatcagtcactgtgggtggcagtctttcctccgtcttgggccctcccgttcctgaaattaaagtgaaagaagaagtagaaccaatggatatcatgaggccagtttctgcagttcctccactggctaccaacactgtgtctccatctcttgcattgctggcaaacaacttgtccatgcctacaagtgacctaccacctggtgcctccccaaggaaaaagcctcgaaagcaacagcatgtgatctcaacagaagaaggtgacatgatggagacaaacagcactgatgatgagaagtccactgccaagagtcttctggtgaaggctgagaagcgcaagtctcctcccaaggagtatattgatgaggaaggtgtgagatatgtcccagtgcgtccaagaccccccattactttgcttcgtcactatcggaacccctggaaagctgcttaccaccactttcagaggtacagtgacgtccgggtcaaagaggagaagaaagctatgctgcaggaaatagctaatcagaaaggagtatcctgtcgtgctcaaggctggaaagtccacctctgtgctgcccagttactacagctgacgaatctagaacatgatgtctatgaaagacttactaacctgcaggaagggattatcccaaagaaaaaagcagcaacagatgatgatctccaccgaataaacgaactgatacagggaaatatgcagaggtgtaaacttgtgatggatcaaatcagtgaagccagagactccatgcttaaggttttagatcataaagaccgtgtcctgaagctgcttaacaagaacgggactgtcaaaaaagtgtccaaattgaagcgaaaggaaaaagtctag

SEQ ID NO: 80 - DNA, 2589 bp, Homo sapiens;
atgaggatgtgcacccccattagggggctgctcatggcccttgcagtgatgtttgggacagcgatggcatttgcacccataccccggatcacctgggagcacagagaggtgcacctggtgcagtttcatgagccagacatctacaactactcagccttgctgctgagcgaggacaaggacaccttgtacataggtgcccgggaggcggtcttcgctgtgaacgcactcaacatctccgagaagcagcatgaggtgtattggaaggtctcagaagacaaaaaagcaaaatgtgcagaaaaggggaaatcaaaacagacagagtgcctcaactacatccgggtgctgcagccactcagcgccacttccctttacgtgtgtgggaccaacgcattccagccggcctgtgaccacctgaacttaacatcctttaagtttctggggaaaaatgaagatggcaaaggaagatgtccctttgacccagcacacagctacacatccgtcatggttgatggagaactttattcggggacgtcgtataattttttgggaagtgaacccatcatctcccgaaattcttcccacagtcctctgaggacagaatatgcaatcccttggctgaacgagcctagtttcgtgtttgctgacgtgatccgaaaaagcccagacagccccgacggcgaggatgacagggtctacttcttcttcacggaggtgtctgtggagtatgagtttgtgttcagggtgctgatcccacggatagcaagagtgtgcaagggggaccagggcggcctgaggaccttgcagaagaaatggacctccttcctgaaagcccgactcatctgctcccggccagacagcggcttggtcttcaatgtgctgcgggatgtcttcgtgctcaggtccccgggcctgaaggtgcctgtgttctatgcactcttcaccccacagctgaacaacgtggggctgtcggcagtgtgcgcctacaacctgtccacagccgaggaggtcttctcccacgggaagtacatgcagagcaccacagtggagcagtcccacaccaagtgggtgcgctataatggcccggtacccaagccgcggcctggagcgtgcatcgacagcgaggcacgggccgccaactacaccagctccttgaatttgccagacaagacgctgcagttcgttaaagaccaccctttgatggatgactcggtaaccccaatagacaacaggcccaggttaatcaagaaagatgtgaactacacccagatcgtggtggaccggacccaggccctggatgggactgtctatgatgtcatgtttgtcagcacagaccggggagctctgcacaaagccatcagcctcgagcacgctgttcacatcatcgaggagacccagctcttccaggactttgagccagtccagaccctgctgctgtcttcaaagaagggcaacaggtttgtctatgctggctctaactcgggcgtggtccaggccccgctggccttctgtgggaagcacggcacctgcgaggactgtgtgctggcgcgggacccctactgcgcctggagcccgcccacagcgacctgcgtggctctgcaccagaccgagagccccagcaggggtttgattcaggagatgagcggcgatgcttctgtgtgcccggataaaagtaaaggaagttaccggcagcattttttcaagcacggtggcacagcggaactgaaatgctcccaaaaatccaacctggcccgggtcttttggaagttccagaatggcgtgttgaaggccgagagccccaagtacggtcttatgggcagaaaaaacttgctcatcttcaacttgtcagaaggagacagtggggtgtaccagtgcctgtcagaggagagggttaagaacaaaacggtcttccaagtggtcgccaagcacgtcctggaagtgaaggtggttccaaagcccgtagtggcccccaccttgtcagttgttcagacagaaggtagtaggattgccaccaaagtgttggtggcatccacccaagggtcttctcccccaaccccagccgtgcaggccacctcctccggggccatcacccttcctcccaagcctgcgcccaccggcacatcctgcgaaccaaagatcgtcatcaacacggtcccccagctccactcggagaaaaccatgtatcttaagtccagcgacaaccgcctcctcatgtccctcttcctcttcttctttgttctcttcctctgcctctttttctacaactgctataagggatacctgcccagacagtgcttgaaattccgctcggccctactaattgggaagaagaagcccaagtcagatttctgtgaccgtgagcagagcctgaaggagacgttagtagagccagggagcttctcccagcagaatggggagcaccccaagccagccctggacaccggctatgagaccgagcaagacaccatcaccagcaaagtccccacggatagggaggactcacagaggatcgacgacctttctgccagggacaagccctttgacgtcaagtgtgagctgaagttcgctgactcagacgcagatggagactga

SEQ ID NO: 81 - DNA, 2484 bp, Homo sapiens;
atgcgcggctgcctgcggctcgcgctgctctgcgcgctgccctggctcctgctggcggcgtcgcccgggcacccggcgaaatcccccaggcagcccccggcaccgcgccgcgaccccttcgacgctgccaggggcgccgatttcgatcatgtctacagcggggtggtgaacctcagcaccgagaacatctactctttcaactacaccagccagcccgaccaggtgacagccgtgagggtgtatgtgaacagttcctctgagaatctcaactacccggtccttgttgtggttcgccagcagaaagaggtgctgtcctggcaggttcctctgctcttccaaggactataccagaggagctacaactatcaagaagtgagccgcaccttatgtccctcagaagcaaccaatgagacgggacccttgcagcaactgatatttgtagatgtcgcatccatggcacccctgggtgctcagtacaaactgctagttaccaagctgaagcacttccagctccggacaaatgttgcctttcactttactgccagcccctctcaacctcagtattttctatacaagtttcccaaagacgtggactcagttatcattaaagtggtgtctgaaatggcttatccatgttctgttgtctcagtccagaatatcatgtgcccggtgtatgatctcgaccacaatgtggaatttaatggtgtctatcagtccatgaccaagaaagctgccatcacgctacagaagaaggattttccaggcgagcagttcttcgtggtatttgtgataaagcctgaagattatgcctgtggaggatctttcttcatccaggaaaaggaaaaccagacctggaatctacagcgaaaaaagaaccttgaagtgaccattgtcccttccattaaagaatctgtttatgtgaaatccagtcttttcagtgtcttcatcttcctgtccttctacttgggatgccttcttgttgggtttgttcattatctgaggtttcagagaaaatccattgatggaagctttgggtccaatgatggctctggaaatatggtggcatctcatcccattgctgccagcacacccgaagggagcaattatgggacaatagatgagtcaagctccagtcctggaaggcagatgtcctcctccgatggtgggccaccgggccagtcagacacagacagctccgtggaggagagcgacttcgacaccatgccagacattgagagtgataaaaacatcatccggaccaagatgttcctttacctgtcagatttgtccaggaaggaccggagaattgtcagcaaaaaatataaaatttatttttggaacatcatcaccattgctgtgttttacgcgctgcccgtgatccagctggtcattacctatcagacagtggtaaatgtcactggcaaccaggacatctgttactacaacttcctctgtgctcaccccttgggcgtcctgagtgccttcaacaacattctcagcaatctgggccacgtgcttctgggcttcctcttcctgctgatagtcttgcgccgcgacatcctccatcggagagccctggaagccaaggacatctttgctgtggagtacgggattcccaaacactttggtctcttctacgctatgggcattgcattgatgatggaaggggtgctcagtgcttgctaccatgtctgccctaattattccaacttccaattcgacacctccttcatgtacatgatcgctggcctgtgcatgctgaagctctatcagacccgccacccagacatcaatgccagcgcctactctgcctatgcctcctttgctgtggtcatcatggtcaccgtccttggagtggtgtttggaaaaaatgacgtatggttctgggtcatcttctctgcaatccacgttctggcctcgctagccctcagcacccagatatattatatgggtcgtttcaagatagatttgggaattttccggcgggctgccatggtgttctacacagactgtatccagcagtgtagccgacctctatatatggatagaatggtgttgctggttgtggggaatctggttaactggtccttcgccctctttggattgatataccgccccagggactttgcttcctacatgctgggcatcttcatctgtaaccttttgctgtacctggccttttacatcatcatgaagctccgcagctctgaaaaggtcctcccagtcccgctcttctgcatcgtggccaccgctgtgatgtgggctgccgccctatattttttcttccagaatctcagcagctgggagggaactccggccgaatcccgggagaagaaccgcgagtgcattctgctggatttcttcgatgaccatgacatctggcacttcctctctgctactgctctgtttttctcattcttggttttgttaactttggatgatgaccttgatgtggttcggagagaccagatccctgtcttctga

SEQ ID NO: 82 - DNA, 1362 bp, Homo sapiens;
atggcgctggtgcgcgcactcgtctgctgcctgctgactgcctggcactgccgctccggcctcgggctgcccgtggcgcccgcaggcggcaggaatcctcctccggcgataggacagttttggcatgtgactgacttacacttagaccctacttaccacatcacagatgaccacacaaaagtgtgtgcttcatctaaaggtgcaaatgcctccaaccctggcccttttggagatgttctgtgtgattctccatatcaacttattttgtcagcatttgattttattaaaaattctggacaagaagcatctttcatgatatggacaggggatagcccacctcatgttcctgtacctgaactctcaacagacactgttataaatgtgatcactaatatgacaaccaccatccagagtctctttccaaatctccaggttttccctgcgctgggtaatcatgactattggccacaggatcaactgcctgtagtcaccagtaaagtgtacaatgcagtagcaaacctctggaaaccatggctagatgaagaagctattagtactttaaggaaaggtggtttttattcacagaaagttacaactaatccaaaccttaggatcatcagtctaaacacaaacttgtactacggcccaaatataatgacactgaacaagactgacccagccaaccagtttgaatggctagaaagtacattgaacaactctcagcagaataaggagaaggtgtatatcatagcacatgttccagtggggtatctgccatcttcacagaacatcacagcaatgagagaatactataatgagaaattgatagatatttttcaaaaatacagtgatgtcattgcaggacaattttatggacacactcacagagacagcattatggttctttcagataaaaaaggaagtccagtaaattctttgtttgtggctcctgctgttacaccagtgaagagtgttttagaaaaacagaccaacaatcctggtatcagactgtttcagtatgatcctcgtgattataaattattggatatgttgcagtattacttgaatctgacagaggcgaatctaaagggagagtccatctggaagctggagtatatcctgacccagacctacgacattgaagatttgcagccggaaagtttatatggattagctaaacaatttacaatcctagacagtaagcagtttataaaatactacaattacttctttgtgagttatgacagcagtgtaacatgtgataagacatgtaaggcctttcagatttgtgcaattatgaatcttgataatatttcctatgcagattgcctcaaacagctttatataaagcacaattactag

SEQ ID NO: 83 - DNA, 789 bp, Homo sapiens;
atgaagaccccattcggaaagacacctggccagcggtccagagctgatgcaggccatgctggagtatctgccaacatgatgaagaagaggacatcccacaaaaaacatcggagcagtgtgggtccgagcaaacctgtttcccagccccggcggaacatcgtaggctgcaggattcagcatgggtggaaagaggggaatggccctgttacccagtggaaaggaaccgttctggaccaggtgcctgtaaatccttctttgtatcttataaaatacgatggatttgactgtgtttatggactagaacttaataaagatgaaagagtttctgcgcttgaagtcctccctgatagagttgcgacatctcgaatcagcgatgcacacttggcagacacaatgattggcaaagcagtggaacatatgtttgagacagaggatggttctaaagatgagtggaggggaatggtcttagcacgtgcacctgtcatgaacacatggttttacattacctatgagaaagaccctgtcttgtacatgtaccaactcttagatgattacaaagaaggcgaccttcgcattatgcctgattccaatgattcacctccagcagaaagggaaccaggagaagttgtggacagcctggtaggcaaacaagtggaatatgccaaagaagatggctcgaaaaggactggcatggtcattcatcaagtagaagccaagccctccgtctatttcatcaagtttgatgatgatttccatatttatgtctacgatttggtgaaaacatcctag

SEQ ID NO: 84 - DNA, 1053 bp, Homo sapiens;
atgaagtgctccctgcgggtgtggttcctctccgtggccttcctgctggtgttcatcatgtccctgctcttcacctactcgcaccacagcatggccacgctcccctacctggactcaggggccctggatgggacgcaccgggtgaagctggtgcccggctatgccggcctgcagcgcctcagcaaggagaggctctcgggcaagagctgtgcctgtcgccgctgcatgggcgatgccggtgcctccgactggtttgacagccactttgacggtaacatttcccccgtctggacccgagagaacatggatcttccaccggacgtccagaggtggtggatgatgctgcagccccagttcaagtcacacaacaccaatgaggtgctggagaagctgttccagatagtgcctggcgagaacccctaccgcttccgggacccccaccagtgccggcgctgtgccgtggtggggaactcgggcaacctgcggggctctggctatgggcaggacgtggacgggcacaacttcatcatgaggatgaatcaggcgccaaccgtgggctttgagcaggatgttggcagccgaaccacccaccatttcatgtaccctgagagtgccaagaacctgcccgccaacgtcagcttcgtgctggtgcccttcaaggtcctggaccttctgtggatcgccagcgccttgtccacggggcagatccgattcacctacgccccagtgaagtccttccttcgagtggataaagaaaaggtccagatctacaacccagccttcttcaagtatatccacgacaggtggacagagcatcacgggcggtacccttccacggggatgctggtgcttttctttgccctgcatgtgtgtgatgaggtgaacgtgtacgggttcggggccgacagccggggcaactggcaccactactgggagaacaaccggtacgcgggcgagttccggaagactggcgtgcacgacgcggacttcgaggcccacatcatcgacatgctggccaaggccagcaagatcgaagtctaccggggcaactga

SEQ ID NO: 85 - DNA, 2733 bp, Homo sapiens;
atgattgacttaagcttcctgactgaagaggaacaagaggccatcatgaaggttttgcagcgggatgctgctctgaagagggccgaagaagagagagtcagacatttgcctgaaaaaattaaggatgaccagcagctgaagaatatgagtggccaatggttttatgaagccaaggcaaaaaggcacagggacaaaatccatggcgcagatatcatcagagcatctatgagaaagaagaggccccagatagcagctgagcagagtaaagacagagaaaatggggcaaaggaaagctgggtgaataatgtcaacaaagatgctttccttcctccagagctggctggcgttgtagaagagccagaagaagatgcagcaccagcaagcccgagttccagtgtggtaaatccagcttccagtgtgattgatatgtcccaggaaaacacaaggaaaccaaatgtgtctccagagaagaggaagaatccgtttaatagctccaagttgccagaaggtcactcatcacaacaaactaaaaatgaacagtcaaaaaatggaagaactggtttatttcagacttcaaaagaggatgaattgtcagagtcaaaagaaaagtcaactgtcgcagatacttcaatccaaaagttagagaaatcaaagcagactttgccaggcctttcaaatgggtcccaaatcaaggctccaatccccaaagccaggaagatgatctacaaatcaactgatttaaacaaagatgataaccagtcttttcctagacaaaggacagactccctgaaagcgagaggggctccgagagggatcctcaagcgcaactccagttccagtagcacagactcagaaacccttcgttataatcacaactttgaacccaaaagcaaaattgtgtcacctggcctaaccatccatgagagaatttctgagaaggagcattctttagaagacaactcttccccaaactccctggagccattaaagcatgtgagattctctgcagtgaaggatgagcttccacagagtcctgggctaatccatggtcgggaagtaggagaatttagtgttttagaatctgacagattgaaaaatggaatggaagatgcaggggacacagaagagtttcagagtgaccctaagccttctcaatacagaaagccttcgctttttcatcaatcaacctcaagcccatatgtatcaaaaagtgaaacacatcagccaatgacttctggttcttttccaattaatgggctgcattctcattcagaagttttaactgcaagaccacagtctatggagaattcaccaaccatcaatgaacccaaagataaatcatcagaattaacaaggcttgaatctgtattacccagaagccctgctgatgaactgtctcattgtgttgagcctgagccatctcaggtgccaggtggcagttctagagaccgtcagcaaggttcagaagaagaacccagtcctgttttgaaaactttggaaaggagtgccgctaggaaaatgccttccaaaagtctagaagacatttcatcagattcatcaaatcaagcaaaagtagataatcagccagaagaattagtgcgtagtgctgaagatgatgagaaaccagatcagaagccagttacaaatgaatgcgtaccaagaatttccacagtgcctacacaacctgataatccattttctcaccctgacaaactcaaaaggatgagcaagtctgttccagcatttctccaagatgaggtgagtggcagtgtgatgagtgtttatagtggagactttggcaatctggaagttaaaggaaatattcagtttgcaattgaatatgtggagtcactgaaggagttgcatgtttttgtggcccagtgtaaggacttagcagcagcggatgtaaaaaaacagcgttcagacccatatgtaaaggcctatttgctaccagacaaaggcaaaatgggcaagaagaaaacactcgtagtgaagaaaaccttgaatcctgtgtataacgaaatactgcggtataaaattgaaaaacaaatcttaaagacacagaaattgaacctgtccatttggcatcgggatacatttaagcgcaatagtttcctaggggaggtggaacttgatttggaaacatgggactgggataacaaacagaataaacaattgagatggtaccctctgaagcggaagacagcaccagttgcccttgaagcagaaaacagaggtgaaatgaaactagctctccagtatgtcccagagccagtccctggtaaaaagcttcctacaactggagaagtgcacatctgggtgaaggaatgccttgatctaccactgctaaggggaagtcatctaaattcttttgttaaatgtaccatccttccagatacaagtaggaaaagtcgccagaagacaagagctgtagggaaaaccaccaaccctatcttcaaccacactatggtgtatgatgggttcaggcctgaagatctgatggaagcctgtgtagagcttactgtctgggaccattacaaattaaccaaccaatttttgggaggtcttcgtattggctttggaacaggtaaaagttatgggactgaagtggactggatggactctacttcagaggaagttgctctctgggagaagatggtaaactcccccaatacttggattgaagcaacactgcctctcagaatgcttttgattgccaagatttccaaatga

SEQ ID NO: 86 - DNA, 2556 bp, Homo sapiens;
atgacttcccattatgtgattgccatctttgccctgatgagctcctgtttagccactgcaggtccagagcctggtgcactgtgtgaactgtcacctgtcagtgcctcccatcctgtccaggccttgatggagagcttcactgttttgtcaggctgtgccagcagaggcacaactgggctgccacaggaggtgcatgtcctgaatctccgcactgcaggccaggggcctggccagctacagagagaggtcacacttcacctgaatcccatctcctcagtccacatccaccacaagtctgttgtgttcctgctcaactccccacaccccctggtgtggcatctgaagacagagagacttgccactggggtctccagactgtttttggtgtctgagggttctgtggtccagttttcatcagcaaacttctccttgacagcagaaacagaagaaaggaacttcccccatggaaatgaacatctgttaaattgggcccgaaaagagtatggagcagttacttcattcaccgaactcaagatagcaagaaacatttatattaaagtgggggaagatcaagtgttccctccaaagtgcaacatagggaagaattttctctcactcaattaccttgctgagtaccttcaacccaaagcagcagaagggtgtgtgatgtccagccagccccagaatgaggaagtacacatcatcgagctaatcacccccaactctaacccctacagtgctttccaggtggatataacaattgatataagaccttctcaagaggatcttgaagtggtcaaaaatctcatcctgatcttgaagtgcaaaaagtctgtcaactgggtgatcaaatcttttgatgttaagggaagcctgaaaattattgctcctaacagtattggctttggaaaagagagtgaaagatctatgacaatgaccaaatcaataagagatgacattccttcaacccaagggaatctggtgaagtgggctttggacaatggctatagtccaataacttcatacacaatggctcctgtggctaatagatttcatcttcggcttgaaaataatgcagaggagatgggagatgaggaagtccacactattcctcctgagctacggatcctgctggaccctggtgccctgcctgccctgcagaacccgcccatccggggaggggaaggccaaaatggaggccttccgtttcctttcccagatatttccaggagagtctggaatgaagagggagaagatgggctccctcggccaaaggaccctgtcattcccagcatacaactgtttcctggtctcagagagccagaagaggtgcaagggagcgtggatattgccctgtctgtcaaatgtgacaatgagaagatgatcgtggctgtagaaaaagattcttttcaggccagtggctactcggggatggacgtcaccctgttggatcctacctgcaaggccaagatgaatggcacacactttgttttggagtctcctctgaatggctgcggtactcggccccggtggtcagcccttgatggtgtggtctactataactccattgtgatacaggttccagcccttggggacagtagtggttggccagatggttatgaagatctggagtcaggtgataatggatttccgggagatatggatgaaggagatgcttccctgttcacccgacctgaaatcgtggtgtttaattgcagccttcagcaggtgaggaaccccagcagcttccaggaacagccccacggaaacatcaccttcaacatggagctatacaacactgacctctttttggtgccctcccagggcgtcttctctgtgccagagaatggacacgtttatgttgaggtatctgttactaaggctgaacaagaactgggatttgccatccaaacgtgctttatctctccatattcgaaccctgataggatgtctcattacaccattattgagaatatttgtcctaaagatgaatctgtgaaattctacagtcccaagagagtgcactttcctatcccgcaagctgacatggataagaagcgattcagctttgtcttcaagcctgtcttcaacacctcactgctctttctacagtgtgagctgacgctgtgtacgaagatggagaagcacccccagaagttgcctaagtgtgtgcctcctgacgaagcctgcacctcgctggacgcctcgataatctgggccatgatgcagaataagaagacgttcactaagccccttgctgtgatccaccatgaagcagaatctaaagaaaaaggtccaagcatgaaggaaccaaatccaatttctccaccaattttccatggtctggacaccctaaccgtgatgggcattgcgtttgcagcctttgtgatcggagcactcctgacgggggccttgtggtacatctattctcacacaggggagacagcaggaaggcagcaagtccccacctccccgccagcctcggaaaacagcagtgctgcccacagcatcggcagcacgcagagcacgccttgctccagcagcagcacggcctag

SEQ ID NO: 87 - DNA, 2319 bp, Homo sapiens;
atgtatccgcagggcagacatccggctccccatcaacccgggcagccgggatttaaattcacggtggctgagtcttgtgacaggatcaaagacgaattccagttcctgcaagctcagtatcacagcctcaaagtggagtacgacaagctggcaaacgagaagacggagatgcagcgccattatgtgatgtactatgagatgtcctatggcttgaacattgaaatgcacaagcagacagagattgcgaagagactgaacacaattttagcacagatcatgcctttcctgtcacaagagcaccagcagcaggtggcgcaggcagtggagcgcgccaagcaggtcaccatgacggagctgaacgccatcatcgggcagcagcagctccaggcgcagcacctctcccatgccacacacggccccccggtccagttgccaccccacccgtcaggtctccagcctccaggaatccccccagtgacagggagcagctccgggctgctggcactgggcgccctgggcagccaggcccatctgacggtgaaggatgagaagaaccaccatgaactcgatcacagagagagagaatccagtgcgaataactctgtgtcaccctcggaaagcctccgggccagtgagaagcaccggggctctgcggactacagcatggaagccaagaagcggaaggcggaggagaaggacagcttgagccgatacgacagtgatggagacaagagtgatgatctggtggtggatgtttccaatgaggaccccgcaacgccccgggtcagcccggcacactcccctcctgaaaatgggctggacaaggcccgtagcctgaaaaaagatgcccccaccagccctgcctcggtggcctcttccagtagcacaccttcctccaagaccaaagaccttggtcataacgacaaatcctccacccctgggctcaagtccaacacaccaaccccaaggaacgacgccccaactccaggcaccagcacgaccccagggctcaggtcgatgccgggtaaacctccgggcatggacccgataggtataatggcctcggctctgcgcacgcccatctccatcaccagctcctatgcggcgcccttcgccatgatgagccaccatgagatgaacggctccctcaccagtcctggcgcctacgccggcctccacaacatcccaccccagatgagcgccgccgccgctgctgcagccgctgcctatggccgatcgccaatggtgagctttggagctgttggttttgaccctcaccccccgatgcgggccacaggcctcccctcaagcctggcctccattcctggaggaaaaccagcgtactcattccatgtgagtgctgatgggcagatgcagcccgtgcccttcccccacgacgccctggcaggccccggcatcccgaggcacgcccggcagatcaacacactcagccacggggaggtggtgtgtgccgtgaccatcagcaaccccacgaggcacgtctacacaggtggcaagggctgcgtgaagatctgggacatcagccagccaggcagcaagagccccatctcccagctggactgcctgaacagggacaattacatccgctcctgcaagctgctccctgatgggcgcacgctcatcgtgggcggcgaggccagcacgctcaccatctgggacctggcctcgcccacgccccgcatcaaggccgagctgacgtcctcggctcccgcctgttatgccctggccattagccctgacgccaaagtctgcttctcctgctgcagcgatgggaacattgctgtctgggacctgcacaaccagaccctggtcaggcagttccagggccacacagatggggccagctgcatagacatctcccatgatggcaccaaactgtggacagggggcctggacaacacggtgcgctcctgggacctgcgggagggccgacagctacagcagcatgacttcacttcccagatcttctcgctgggctactgccccactggggagtggctggctgtgggcatggagagcagcaacgtggaggtgctgcaccacaccaagcctgacaagtaccagctgcacctgcacgagagctgcgtgctctccctcaagttcgcctactgcggcaagtggttcgtgagcactgggaaagataaccttctcaacgcctggaggacgccttatggagccagcatattccagtctaaagaatcctcgtctgtcttgagttgtgacatttcagcggatgacaaatacattgtaacaggctctggtgacaagaaggccacagtttatgaggtcatctactaa

SEQ ID NO: 88 - DNA, 2577 bp, Homo sapiens;
atgggagaccacctggaccttctcctaggagtggtgctcatggccggtcctgtgtttggaattccttcctgctcctttgatggccgaatagccttttatcgtttctgcaacctcacccaggtcccccaggtcctcaacaccactgagaggctcctgctgagcttcaactatatcaggacagtcactgcttcatccttcccctttctggaacagctgcagctgctggagctcgggagccagtatacccccttgactattgacaaggaggccttcagaaacctgcccaaccttagaatcttggacctgggaagtagtaagatatacttcttgcatccagatgcttttcagggactgttccatctgtttgaacttagactgtatttctgtggtctctctgatgctgtattgaaagatggttatttcagaaatttaaaggctttaactcgcttggatctatccaaaaatcagattcgtagcctttaccttcatccttcatttgggaagttgaattccttaaagtccatagatttttcctccaaccaaatattccttgtatgtgaacatgagctcgagcccctacaagggaaaacgctctccttttttagcctcgcagctaatagcttgtatagcagagtctcagtggactggggaaaatgtatgaacccattcagaaacatggtgctggagatactagatgtttctggaaatggctggacagtggacatcacaggaaactttagcaatgccatcagcaaaagccaggccttctctttgattcttgcccaccacatcatgggtgccgggtttggcttccataacatcaaagatcctgaccagaacacatttgctggcctggccagaagttcagtgagacacctggatctttcacatgggtttgtcttctccctgaactcacgagtctttgagacactcaaggatttgaaggttctgaaccttgcctacaacaagataaataagattgcagatgaagcattttacggacttgacaacctccaagttctcaatttgtcatataaccttctgggggaactttacagttcgaatttctatggactacctaaggtagcctacattgatttgcaaaagaatcacattgcaataattcaagaccaaacattcaaattcctggaaaaattacagaccttggatctccgagacaatgctcttacaaccattcattttattccaagcatacccgatatcttcttgagtggcaataaactagtgactttgccaaagatcaaccttacagcgaacctcatccacttatcagaaaacaggctagaaaatctagatattctctactttctcctacgggtacctcatctccagattctcattttaaatcaaaatcgcttctcctcctgtagtggagatcaaaccccttcagagaatcccagcttagaacagcttttccttggagaaaatatgttgcaacttgcctgggaaactgagctctgttgggatgtttttgagggactttctcatcttcaagttctgtatttgaatcataactatcttaattcccttccaccaggagtatttagccatctgactgcattaaggggactaagcctcaactccaacaggctgacagttctttctcacaatgatttacctgctaatttagagatcctggacatatccaggaaccagctcctagctcctaatcctgatgtatttgtatcacttagtgtcttggatataactcataacaagttcatttgtgaatgtgaacttagcacttttatcaattggcttaatcacaccaatgtcactatagctgggcctcctgcagacatatattgtgtgtaccctgactcgttctctggggtttccctcttctctctttccacggaaggttgtgatgaagaggaagtcttaaagtccctaaagttctcccttttcattgtatgcactgtcactctgactctgttcctcatgaccatcctcacagtcacaaagttccggggcttctgttttatctgttataagacagcccagagactggtgttcaaggaccatccccagggcacagaacctgatatgtacaaatatgatgcctatttgtgcttcagcagcaaagacttcacatgggtgcagaatgctttgctcaaacacctggacactcaatacagtgaccaaaacagattcaacctgtgctttgaagaaagagactttgtcccaggagaaaaccgcattgccaatatccaggatgccatctggaacagtagaaagatcgtttgtcttgtgagcagacacttccttagagatggctggtgccttgaagccttcagttatgcccagggcaggtgcttatctgaccttaacagtgctctcatcatggtggtggttgggtccttgtcccagtaccagttgatgaaacatcaatccatcagaggctttgtacagaaacagcagtatttgaggtggcctgaggatctccaggatgttggctggtttcttcataaactctctcaacagatactaaagaaagaaaaagaaaagaagaaagacaataacattccgttgcaaactgtagcaaccatctcctaa

SEQ ID NO: 89 - DNA, 975 bp, Homo sapiens;
atggcggccgcggctccagggaacggccgcgcatcggcgccccggctgcttctgctctttctggttccgctgctgtgggccccggctgcggtccgggccggcccagatgaagaccttagccaccggaacaaagaaccgccggcgccggcccagcagctgcagccgcagcctgtggctgtgcagggccccgagccggcccgggtcgagaaaatatttacaccagcagctccagttcataccaataaagaagatcctgctacccaaactaatttgggatttatccatgcatttgtcgctgccatatcagttattattgtatctgaattgggtgataagacattttttatagcagccatcatggcaatgcgctataaccgcctgaccgtgctggctggtgcaatgcttgccttgggactaatgacatgcttgtcagttttgtttggctatgccaccacagtcatccccagggtctatacatactatgtttcaactgtattatttgccatttttggcattagaatgcttcgggaaggcttaaagatgagccctgatgagggtcaagaggaactggaagaagttcaagctgaattaaagaagaaagatgaagaatttcaacgaaccaaacttttaaatggaccgggagatgttgaaacgggtacaagcataacagtacctcagaaaaagtggttgcattttatttcacccatttttgttcaagctcttacattaacattcttagcagaatggggtgatcgctctcaactaactacaattgtattggcagctagagaggacccctatggtgtagccgtgggtggaactgtggggcactgcctgtgcacgggattggcagtaattggaggaagaatgatagcacagaaaatctctgtcagaactgtgacaatcataggaggcatcgtttttttggcgtttgcattttctgcactatttataagccctgattctggtttttaa

SEQ ID NO: 90 - DNA, 510 bp, Homo sapiens;
atggccccgccctgggtgcccgccatgggcttcacgctggcgcccagcctggggtgcttcgtgggctcccgctttgtccacggcgagggtctccgctggtacgccggcctgcagaagccctcgtggcacccgccccactgggtgctgggccctgtctggggcacgctctactcagccatggggtacggctcctacctggtctggaaagagctgggaggcttcacagagaaggctgtggttcccctgggcctctacactgggcagctggccctgaactgggcatggccccccatcttctttggtgcccgacaaatgggctgggccttggtggatctcctgctggtcagtggggcggcggcagccactaccgtggcctggtaccaggtgagcccgctggccgcccgcctgctctacccctacctggcctggctggccttcacgaccacactcaactactgcgtatggcgggacaaccatggctggcgtgggggacggcggctgccagagtga

SEQ ID NO: 91 - DNA, 10302 bp, Homo sapiens;
atggccaagtatggagaacatgaagccagtcctgacaatgggcagaacgaattcagtgatatcattaagtccagatctgatgaacacaatgacgtacagaagaaaacctttaccaaatggataaatgctcgattttcaaagagtgggaaaccacccatcaatgatatgttcacagacctcaaagatggaaggaagctattggatcttctagaaggcctcacaggaacatcactgccaaaggaacgtggttccacaagggtacatgccttaaataacgtcaacagagtgctgcaggttttacatcagaacaatgtggaattagtgaatatagggggaactgacattgtggatggaaatcacaaactgactttggggttactttggagcatcattttgcactggcaggtgaaagatgtcatgaaggatgtcatgtcggacctgcagcagacgaacagtgagaagatcctgctcagctgggtgcgtcagaccaccaggccctacagccaagtcaacgtcctcaacttcaccaccagctggacagatggactcgcctttaatgctgtcctccaccgacataaacctgatctcttcagctgggataaagttgtcaaaatgtcaccaattgagagacttgaacatgccttcagcaaggctcaaacttatttgggaattgaaaagctgttagatcctgaagatgttgccgttcagcttcctgacaagaaatccataattatgtatttaacatctttgtttgaggtgctacctcagcaagtcaccatagacgccatccgtgaggtagagacactcccaaggaaatataaaaaagaatgtgaagaagaggcaattaatatacagagtacagcgcctgaggaggagcatgagagtccccgagctgaaactcccagcactgtcactgaggttgacatggatctggacagctatcagattgcgttggaggaagtgctgacctggttgctttctgctgaggacactttccaggagcaggatgatatttctgatgatgttgaagaagtcaaagaccagtttgcaacccatgaagcttttatgatggaactgactgcacaccagagcagtgtgggcagcgtcctgcaggcaggcaaccaactgataacacaaggaactctgtcagacgaagaagaatttgagattcaggaacagatgaccctgctgaatgctagatgggaggctcttagggtggagagtatggacagacagtcccggctgcacgatgtgctgatggaactgcagaagaagcaactgcagcagctctccgcctggttaacactcacagaggagcgcattcagaagatggaaacttgccccctggatgatgatgtaaaatctctacaaaagctgctagaagaacataaaagtttgcaaagtgatcttgaggctgaacaggtgaaagtaaattcactaactcacatggtggtcattgttgatgaaaacagtggtgagagtgctacagctatcctagaagaccagttacagaaacttggtgagcgctggacagcagtatgccgttggactgaagaacgctggaataggttacaagaaatcaatatattgtggcaggaattattggaagaacagtgcttgttgaaagcttggttaaccgaaaaagaagaggctttaaataaagtccagacaagcaacttcaaagaccaaaaggaactaagtgtcagtgttcgacgtctggctattttgaaggaagacatggaaatgaagcgtcaaacattggatcagctgagtgagattggccaggatgtgggacaattacttgataattccaaggcatctaagaagatcaacagtgactcagaggaactgactcaaagatgggattctttggttcagagactagaagattcctccaaccaggtgactcaggctgtagcaaagctggggatgtctcagattcctcagaaggaccttttggagactgttcgtgtaagagaacaagcaattacaaaaaaatctaagcaggaactgcctcctcctcctcccccaaagaagagacagatccatgtggatattgaagctaagaaaaagtttgatgctataagtgcagagctgttgaactggattttgaaatggaaaactgccattcagaccacagagataaaagagtatatgaagatgcaagacacttccgaaatgaaaaagaagttgaaggcattagaaaaagaacagagagaaagaatccccagagcagatgaattaaaccaaactggacaaatccttgtggagcaaatgggaaaagaaggccttcctactgaagaaataaaaaatgttctggagaaggtttcatcagaatggaagaatgtatctcaacatttggaagatctagaaagaaagattcagctacaggaagatataaatgcttatttcaagcagcttgatgagcttgaaaaggtcatcaagacaaaggaggagtgggtaaaacacacttccatttctgaatcttcccggcagtccttgccaagcttgaaggattcctgtcagcgggaattgacaaatcttcttggccttcaccccaaaattgaaatggctcgtgcaagctgctcggccctgatgtctcagccttctgccccagattttgtccagcggggcttcgatagctttctgggccgctaccaagctgtacaagaggctgtagaggatcgtcaacaacatctagagaatgaactgaagggccaacctggacatgcatatctggaaacattgaaaacactgaaagatgtgctaaatgattcagaaaataaggcccaggtgtctctgaatgtccttaatgatcttgccaaggtggagaaggccctgcaagaaaaaaagacccttgatgaaatccttgagaatcagaaacctgcattacataaacttgcagaagaaacaaaggctctggagaaaaatgttcatcctgatgtagaaaaattatataagcaagaatttgatgatgtgcaaggaaagtggaacaagctaaaggtcttggtttccaaagatctacatttgcttgaggaaattgctctcacactcagagcttttgaggccgattcaacagtcattgagaagtggatggatggcgtgaaagacttcttaatgaaacagcaggctgcccaaggagacgacgcaggtctacagaggcagttagaccagtgctctgcatttgttaatgaaatagaaacaattgaatcatctctgaaaaacatgaaggaaatagagactaatcttcgaagtggtccagttgctggaataaaaacttgggtgcagacaagactaggtgactaccaaactcaactggagaaacttagcaaggagatcgctactcaaaaaagtaggttgtctgaaagtcaagaaaaagctgcgaacctgaagaaagacttggcagagatgcaggaatggatgacccaggccgaggaagaatatttggagcgggattttgagtacaagtcaccagaagagcttgagagtgctgtggaagagatgaagagggcaaaagaggatgtgttgcagaaggaggtgagagtgaagattctcaaggacaacatcaagttattagctgccaaggtgccctctggtggccaggagttgacgtctgagctgaatgttgtgctggagaattaccaacttctttgtaatagaattcgaggaaagtgccacacgctagaggaggtctggtcttgttggattgaactgcttcactatttggatcttgaaactacctggttaaacactttggaagagcggatgaagagcacagaggtcctgcctgagaagacggatgctgtcaacgaagccctggagtctctggaatctgttctgcgccacccggcagataatcgcacccagattcgagagcttggccagactctgattgatggggggatcctggatgatataatcagtgagaaactggaggctttcaacagccgatatgaagatctaagtcacctggcagagagcaagcagatttctttggaaaagcaactccaggtgctgcgggaaactgaccagatgcttcaagtcttgcaagagagcttgggggagctggacaaacagctcaccacatacctgactgacaggatagatgctttccaagttccacaggaagctcagaaaatccaagcagagatctcagcccatgagctaaccctagaggagttgagaagaaatatgcgttctcagcccctgacctccccagagagtaggactgccagaggaggaagtcagatggatgtgctacagaggaaactccgagaggtgtccacaaagttccagcttttccagaagccagctaacttcgagcagcgcatgctggactgcaagcgtgtgctggatggcgtgaaagcagaacttcacgttctggatgtgaaggacgtagaccctgacgtcatacagacgcacctggacaagtgtatgaaactgtataaaactttgagtgaagtcaaacttgaagtggaaactgtgattaaaacaggaagacatattgtccagaaacagcaaacggacaacccaaaagggatggatgagcagctgacttccctgaaggttctttacaatgacctgggcgcacaggtgacagaaggaaaacaggatctggaaagagcatcacagttggcccggaaaatgaagaaagaggctgcttctctctctgaatggctttctgctactgaaactgaattggtacagaagtccacttcagaaggtctgcttggtgacttggatacagaaatttcctgggctaaaaatgttctgaaggatctggaaaagagaaaagctgatttaaataccatcacagagagtagtgctgccctgcaaaacttgattgagggcagtgagcctattttagaagagaggctctgcgtccttaacgctgggtggagccgagttcgtacctggactgaagattggtgcaataccttgatgaaccatcagaaccagctagaaatatttgatgggaacgtggctcacataagtacctggctttatcaagctgaagctctattggatgaaattgaaaagaaaccaacaagtaaacaggaagaaattgtgaagcgtttagtatctgagctggatgatgccaacctccaggttgaaaatgtccgcgatcaagcccttattttgatgaatgcccgtggaagctcaagcagggagcttgtagaaccaaagttagctgagctgaataggaactttgaaaaggtgtctcaacatatcaaaagtgccaaattgctaattgctcaggaaccattataccaatgtttggtcaccactgaaacatttgaaactggtgtgcctttctctgacttggaaaaattagaaaatgacatagaaaatatgttaaaatttgtggaaaaacacttggaatccagtgatgaagatgaaaagatggatgaggagagtgcccagattgaggaagttctacaaagaggagaagaaatgttacatcaacctatggaagataataaaaaagaaaagatccgtttgcaattattacttttgcatactagatacaacaaaattaaggcaatccctattcaacagaggaaaatgggtcaacttgcttctggaattagatcatcacttcttcctacagattatctggttgaaattaacaaaattttactttgcatggatgatgttgaattatcgcttaatgttccagagctcaacactgctatttacgaagacttctcttttcaggaagactctctgaagaatatcaaagaccaactggacaaacttggagagcagattgcagtcattcatgaaaaacagccagatgtcatccttgaagcctctggacctgaagccattcagatcagagatacacttactcagctgaatgcaaaatgggacagaattaatagaatgtacagtgatcggaaaggttgttttgacagggcaatggaagaatggagacagttccattgtgaccttaatgacctcacacagtggataacagaggctgaagaattactggttgatacctgtgctccaggtggcagcctggacttagagaaagccaggatacatcagcaggaacttgaggtgggcatcagcagccaccagcccagttttgcagcactaaaccgaactggggatgggattgtgcagaaactctcccaggcagatggaagcttcttgaaagaaaaactggcaggtttaaaccaacgctgggatgcaattgttgcagaagtgaaggataggcagccaaggctaaaaggagaaagtaagcaggtgatgaagtacaggcatcagctagatgagattatctgttggttaacaaaggctgagcatgctatgcaaaagagatcaaccaccgaattgggagaaaacctgcaagaattaagagacttaactcaagaaatggaagtacatgctgaaaaactcaaatggctgaatagaactgaattggagatgctttcagataaaagtctgagtttacctgaaagggataaaatttcagaaagcttaaggactgtaaatatgacatggaataagatttgcagagaggtgcctaccaccctgaaggaatgcatccaggagcccagttctgtttcacagacaaggattgctgctcatcctaatgtccaaaaggtggtgctagtatcatctgcgtcagatattcctgttcagtctcatcgtacttcggaaatttcaattcctgctgatcttgataaaactataacagaactagccgactggctggtattaatcgaccagatgctgaagtccaacattgtcactgttggggatgtagaagagatcaataagaccgtttcccgaatgaaaattacaaaggctgacttagaacagcgccatcctcagctggattatgtttttacattggcacagaatttgaaaaataaagcttccagttcagatatgagaacagcaattacagaaaaattggaaagggtcaagaaccagtgggatggcacccagcatggcgttgagctaagacagcagcagcttgaggacatgattattgacagtcttcagtgggatgaccatagggaggagactgaagaactgatgagaaaatatgaggctcgactctatattcttcagcaagcccgacgggatccactcaccaaacaaatttctgataaccaaatactgcttcaagaactgggtcctggagatggtatcgtcatggcgttcgataacgtcctgcagaaactcctggaggaatatgggagtgatgacacaaggaatgtgaaagaaaccacagagtacttaaaaacatcatggatcaatctcaaacaaagtattgctgacagacagaacgccttggaggctgagtggaggacggtgcaggcctctcgcagagatctggaaaacttcctgaagtggatccaagaagcagagaccacagtgaatgtgcttgtggatgcctctcatcgggagaatgctcttcaggatagtatcttggccagggaactcaaacagcagatgcaggacatccaggcagaaattgatgcccacaatgacatatttaaaagcattgacggaaacaggcagaagatggtaaaagctttgggaaattctgaagaggctactatgcttcaacatcgactggatgatatgaaccaaagatggaatgacttaaaagcaaaatctgctagcatcagggcccatttggaggccagcgctgagaagtggaacaggttgctgatgtccttagaagaactgatcaaatggctgaatatgaaagatgaagagcttaagaaacaaatgcctattggaggagatgttccagccttacagctccagtatgaccattgtaaggccctgagacgggagttaaaggagaaagaatattctgtcctgaatgctgtcgaccaggcccgagttttcttggctgatcagccaattgaggcccctgaagagccaagaagaaacctacaatcaaaaacagaattaactcctgaggagagagcccaaaagattgccaaagccatgcgcaaacagtcttctgaagtcaaagaaaaatgggaaagtctaaatgctgtaactagcaattggcaaaagcaagtggacaaggcattggagaaactcagagacctgcagggagctatggatgacctggacgctgacatgaaggaggcagagtccgtgcggaatggctggaagcccgtgggagacttactcattgactcgctgcaggatcacattgaaaaaatcatggcatttagagaagaaattgcaccaatcaactttaaagttaaaacggtgaatgatttatccagtcagctgtctccacttgacctgcatccctctctaaagatgtctcgccagctagatgaccttaatatgcgatggaaacttttacaggtttctgtggatgatcgccttaaacagcttcaggaagcccacagagattttggaccatcctctcagcattttctctctacgtcagtccagctgccgtggcaaagatccatttcacataataaagtgccctattacatcaaccatcaaacacagaccacctgttgggaccatcctaaaatgaccgaactctttcaatcccttgctgacctgaataatgtacgtttttctgcctaccgtacagcaatcaaaatccgaagactacaaaaagcactatgtttggatctcttagagttgagtacaacaaatgaaattttcaaacagcacaagttgaaccaaaatgaccagctcctcagtgttccagatgtcatcaactgtctgacaacaacttatgatggacttgagcaaatgcataaggacctggtcaacgttccactctgtgttgatatgtgtctcaattggttgctcaatgtctatgacacgggtcgaactggaaaaattagagtgcagagtctgaagattggattaatgtctctctccaaaggtctcttggaagaaaaatacagatatctctttaaggaagttgcagggccaacagaaatgtgtgaccagaggcagctgggcctgttacttcatgatgccatccagatcccccggcagctaggtgaagtagcagcttttggaggcagtaatattgagcctagtgttcgcagctgcttccaacagaataacaataaaccagaaataagtgtgaaagagtttatagattggatgcatttggaaccacagtccatggtttggctcccagttttacatcgagtggcagcagcggagactgcaaaacatcaggccaaatgcaacatctgtaaagaatgtccaattgtcgggttcaggtatagaagccttaagcattttaactatgatgtctgccagagttgtttcttttcgggtcgaacagcaaaaggtcacaaattacattacccaatggtggaatattgtatacctacaacatctggggaagatgtacgagacttcacaaaggtacttaagaacaagttcaggtcgaagaagtactttgccaaacaccctcgacttggttacctgcctgtccagacagttcttgaaggtgacaacttagagactcctatcacactcatcagtatgtggccagagcactatgacccctcacaatctcctcaactgtttcatgatgacacccattcaagaatagaacaatatgccacacgactggcccagatggaaaggactaatgggtcttttctcactgatagcagctccaccacaggaagtgtggaagacgagcacgccctcatccagcagtattgccaaacactcggaggagagtccccagtgagccagccgcagagcccagctcagatcctgaagtcagtagagagggaagaacgtggagaactggagaggatcattgctgacctggaggaagaacaaagaaatctacaggtggagtatgagcagctgaaggaccagcacctccgaagggggctccctgtcggttcaccgccagagtcgattatatctccccatcacacgtctgaggattcagaacttatagcagaagcaaaactcctcaggcagcacaaaggtcggctggaggctaggatgcagattttagaagatcacaataaacagctggagtctcagctccaccgcctccgacagctgctggagcagcctgaatctgattcccgaatcaatggtgtttccccatgggcttctcctcagcattctgcactgagctactcgcttgatccagatgcctccggcccacagttccaccaggcagcgggagaggacctgctggccccaccgcacgacaccagcacggatctcacggaggtcatggagcagattcacagcacgtttccatcttgctgcccaaatgttcccagcaggccacaggcaatgtga

SEQ ID NO: 92 - DNA, 360 bp, Homo sapiens;
atggtgaaaatgacaaagtccaaaactttccaagcgtatctgccgaactgtcaccgaacgtacagctgtatccactgcagagcacacctggccaatcatgacgagctcatctccaagtcctttcaggggagccagggacgcgcctacctcttcaattccgtggtgaacgtgggctgcggccctgcagaggagagggtccttctcaccgggctgcatgcggttgccgacatctactgcgagaactgcaagaccacgctcgggtggaaatacgagcatgcctttgagagcagtcagaaatataaggaaggaaaattcatcattgagcttgctcatatgatcaaagacaatggctgggagtaa

SEQ ID NO: 93 - DNA, 1485 bp, Homo sapiens;
atgtcgaccacacttctgtccgccttctacgatgtcgacttcttgtgcaagacagagaaatccctggccaacctcaacctgaacaacatgctggacaagaaggcggtggggacgcctgtggccgccgcccccagctcgggcttcgcgccgggattcctccgacggcactcggccagcaacctgcatgcactcgcccaccccgcgcccagccccggcagctgctcgcccaagttcccgggcgccgctaacggcagcagctgcggcagcgcggcggccggcggtccgacctcctacggcacccttaaggagccgtcggggggcggcggcacagccctgctcaacaaggagaacaaattccgggaccgctcgtttagcgagaacggcgatcgcagccagcacctcctgcacctgcagcagcagcagaaggggggcggcggctcccagatcaactccacgcgctacaagaccgagctgtgccggcccttcgaggagagcggcacgtgcaagtacggcgaaaagtgccagttcgcgcatggcttccacgagctgcgcagcctgactcgccatccgaagtacaagaccgagctgtgccgcacctttcataccatcggcttctgcccctatgggccgcgctgccacttcatccacaacgcggacgagcggcggcccgcgccgtcggggggcgcctccggggacctgcgtgcctttggcacgcgcgatgcgttgcacctgggcttcccgcgggagccgcggcccaagttgcaccacagcctcagcttctcgggcttcccgtcgggccaccatcagcccccgggcggcctcgagtcgccgctgctgctcgacagccccacgtcgcgcacgccgccgccgccctcctgctcttcggcctcgtcctgctcctcctccgcctcctcctgttcctcggcctccgcggcctccacgccctcgggcgccccgacatgctgcgcctccgcggcggccgcggctgcggccgctctgctgtacggcaccgggggcgccgaggacctgctggcgccgggggccccgtgcgcggcctgctcgtcggcctcgtgcgccaacaacgccttcgccttcggtccggagctcagcagcctcatcacgccgctcgccatccagacccacaactttgccgccgtggccgccgccgcctactaccgcagtcagcagcagcagcagcagcagggcctggcgccccccgcgcagccgccggcgccgcccagcgcgaccctccccgccggggccgccgcacctccctcgccgcccttcagcttccagctgccgcgccgcctgtccgactcgcccgtgttcgacgcgccccccagccccccggactcgctgtcggaccgcgacagctacctaagcggctccctgagctccggcagcctcagcggctctgagtctcccagcctcgaccctggccgccgcctgccaatcttcagccgcctctccatctccgacgactga

SEQ ID NO: 94 - DNA, 2514 bp, Homo sapiens;
atggctagcaaacgaaaatctacaactccatgcatggttcggacatcacaagtagtagaacaagatgtgcccgaggaagtagacagggccaaagagaaaggaatcggcacaccacagcctgacgtggccaaggacagttgggcagcagaacttgaaaactcttccaaagaaaacgaagtgatagaggtgaaatctatgggggaaagccagtccaaaaaactccaaggtggttatgagtgcaaatactgcccctactccacgcaaaacctgaacgagttcacggagcatgtcgacatgcagcatcccaacgtgattctcaaccccctctacgtgtgtgcagaatgtaacttcacaaccaaaaagtacgactccctatccgaccacaactccaagttccatcccggggaggccaacttcaagctgaagttaattaaacgcaataatcaaactgtcttggaacagtccatcgaaaccaccaaccatgtcgtgtccatcaccaccagtggccctggaactggtgacagtgattctgggatctcggtgagtaaaacccccatcatgaagcctggaaaaccaaaagcggatgccaagaaggtgcccaagaagcccgaggagatcacccccgagaaccacgtggaagggaccgcccgcctggtgacagacacagctgagatcctctcgagactcggcggggtggagctcctccaagacacattaggacacgtcatgccttctgtacagctgccaccaaatatcaaccttgtgcccaaggtccctgtcccactaaatactaccaaatacaactctgccctggatacaaatgccacgatgatcaactctttcaacaagtttccttacccgacccaggctgagttgtcctggctgacagctgcctccaaacacccagaggagcacatcagaatctggtttgccacccagcgcttaaagcatggcatcagctggtccccagaagaggtggaggaggcccggaagaagatgttcaacggcaccatccagtcagtacccccgaccatcactgtgctgcccgcccagttggcccccacaaaggtgacgcagcccatcctccagacggctctaccgtgccagatcctcggccagactagcctggtgctgactcaggtgaccagcgggtcaacaaccgtctcttgctcccccatcacacttgccgtggcaggagtcaccaaccatggccagaagagacccttggtgactccccaagctgcccccgaacccaagcgtccacacatcgctcaggtgccagagcccccacccaaggtggccaaccccccgctcacaccagccagtgaccgcaagaagacaaaggagcagatagcacatctcaaggccagctttctccagagccagttccctgacgatgccgaggtttaccggctcatcgaggtgactggccttgccaggagcgagatcaagaagtggttcagtgaccaccgatatcggtgtcaaaggggcatcgtccacatcaccagcgaatcccttgccaaagaccagttggccatcgcggcctcccgacacggtcgcacgtatcatgcgtacccagactttgccccccagaagttcaaagagaaaacacagggtcaggttaaaatcttggaagacagctttttgaaaagttcttttcctacccaagcagaactggatcggctaagggtggagaccaagctgagcaggagagagatcgactcctggttctcggagaggcggaagcttcgagacagcatggaacaagctgtcttggattccatggggtctggcaaaaaaggccaagatgtgggagcccccaatggtgctctgtctcgactcgaccagctctccggtgcccagttaacaagttctctgcccagcccttcgccagcaattgcaaaaagtcaagaacaggttcatctcctgaggagcacgtttgcaagaacccagtggcctactccccaggagtacgaccagttagcggccaagactggcctggtccgaactgagattgtgcgttggttcaaggagaacagatgcttgctgaaaacgggaaccgtgaagtggatggagcagtaccagcaccagcccatggcagatgatcacggctacgatgccgtagcaaggaaagcaacaaaacccatggccgagagcccaaagaacgggggtgatgtggttccacaatattacaaggaccccaaaaagctctgcgaagaggacttggagaagttggtgaccagggtaaaagtaggcagcgagccagcaaaagactgtttgccagcaaagccctcagaggccacctcagaccggtcagagggcagcagccgggacggccagggtagcgacgagaacgaggagtcgagcgttgtggattacgtggaggtgacggtcggggaggaggatgcgatctcagatagatcagatagctggagtcaggctgcggcagaaggtgtgtcggaactggctgaatcagactccgactgcgtccctgcagaggctggccaggcctag

SEQ ID NO: 95 - protein, 918 aa, Homo sapiens;
MPGGAGAARLCLLAFALQPLRPRAAREPGWTRGSEEGSPKLQHELIIPQWKTSESPVREKHPLKAELRVMAEGRELILDLEKNEQLFAPSYTETHYTSSGNPQTTTRKLEDHCFYHGTVRETELSSVTLSTCRGIRGLITVSSNLSYVIEPLPDSKGQHLIYRSEHLKPPPGNCGFEHSKPTTRDWALQFTQQTKKRPRRMKREDLNSMKYVELYLVADYLEFQKNRRDQDATKHKLIEIANYVDKFYRSLNIRIALVGLEVWTHGNMCEVSENPYSTLWSFLSWRRKLLAQKYHDNAQLITGMSFHGTTIGLAPLMAMCSVYQSGGVNMDHSENAIGVAATMAHEMGHNFGMTHDSADCCSASAADGGCIMAAATGHPFPKVFNGCNRRELDRYLQSGGGMCLSNMPDTRMLYGGRRCGNGYLEDGEECDCGEEEECNNPCCNASNCTLRPGAECAHGSCCHQCKLLAPGTLCREQARQCDLPEFCTGKSPHCPTNFYQMDGTPCEGGQAYCYNGMCLTYQEQCQQLWGPGARPAPDLCFEKVNVAGDTFGNCGKDMNGEHRKCNMRDAKCGKIQCQSSEARPLESNAVPIDTTIIMNGRQIQCRGTHVYRGPEEEGDMLDPGLVMTGTKCGYNHICFEGQCRNTSFFETEGCGKKCNGHGVCNNNQNCHCLPGWAPPFCNTPGHGGSIDSGPMPPESVGPVVAGVLVAILVLAVLMLMYYCCRQNNKLGQLKPSALPSKLRQQFSCPFRVSQNSGTGHANPTFKLQTPQGKRKVINTPEILRKPSQPPPRPPPDYLRGGSPPAPLPAHLSRAARNSPGPGSQIERTESSRRPPPSRPIPPAPNCIVSQDFSRPRPPQKALPANPVPGRRSLPRPGGASPLRPPGAGPQQSRPLAALAPKFPEYRSQRAGGMISSKI

SEQ ID NO: 96 - protein, 185 aa, Homo sapiens;
MKLVSVALMYLGSLAFLGADTARLDVASEFRKKWNKWALSRGKRELRMSSSYPTGLADVKAGPAQTLIRPQDMKGASRSPEDSSPDAARIRVKRYRQSMNNFQGLRSFGCRFGTCTVQKLAHQIYQFTDKDKDNVAPRSKISPQGYGRRRRRSLPEAGPGRTLVSSKPQAHGAPAPPSGSAPHFL

SEQ ID NO: 97 - protein, 524 aa, Homo sapiens;
MISPFLVLAIGTCLTNSLVPEKEKDPKYWRDQAQETLKYALELQKLNTNVAKNVIMFLGDGMGVSTVTAARILKGQLHHNPGEETRLEMDKFPFVALSKTYNTNAQVPDSAGTATAYLCGVKANEGTVGVSAATERSRCNTTQGNEVTSILRWAKDAGKSVGIVTTTRVNHATPSAAYAHSADRDWYSDNEMPPEALSQGCKDIAYQLMHNIRDIDVIMGGGRKYMYPKNKTDVEYESDEKARGTRLDGLDLVDTWKSFKPRYKHSHFIWNRTELLTLDPHNVDYLLGLFEPGDMQYELNRNNVTDPSLSEMVVVAIQILRKNPKGFFLLVEGGRIDHGHHEGKAKQALHEAVEMDRAIGQAGSLTSSEDTLTVVTADHSHVFTFGGYTPRGNSIFGLAPMLSDTDKKPFTAILYGNGPGYKVVGGERENVSMVDYAHNNYQAQSAVPLRHETHGGEDVAVFSKGPMAHLLHGVHEQNYVPHVMAYAACIGANLGHCAPASSAGSLAAGPLLLALALYPLSVLF

SEQ ID NO: 98 - protein, 357 aa, Homo sapiens;
MARENGESSSSWKKQAEDIKKIFEFKETLGTGAFSEVVLAEEKATGKLFAVKCIPKKALKGKESSIENEIAVLRKIKHENIVALEDIYESPNHLYLVMQLVSGGELFDRIVEKGFYTEKDASTLIRQVLDAVYYLHRMGIVHRDLKPENLLYYSQDEESKIMISDFGLSKMEGKGDVMSTACGTPGYVAPEVLAQKPYSKAVDCWSIGVIAYILLCGYPPFYDENDSKLFEQILKAEYEFDSPYWDDISDSAKDFIRNLMEKDPNKRYTCEQAARHPWIAGDTALNKNIHESVSAQIRKNFAKSKWRQAFNATAVVRHMRKLHLGSSLDSSNASVSSSLSLASQKDCAYVAKPESLS

SEQ ID NO: 99 - protein, 786 aa, Homo sapiens;
MKGTGIMDCAPKALLARALYDNCPDCSDELAFSRGDILTILEQHVPESEGWWKCLLHGRQGLAPANRLQILTEVAADRPCPPFLRGLEEAPASSEETYQVPTLPRPPTPGPVYEQMRSWAEGPQPPTAQVYEFPDPPTSARIICEKTLSFPKQAILTLPRPVRASLPTLPSQVYDVPTQHRGPVVLKEPEKQQLYDIPASPKKAGLHPPDSQASGQGVPLISVTTLRRGGYSTLPNPQKSEWIYDTPVSPGKASVRNTPLTSFAEESRPHALPSSSSTFYNPPSGRSRSLTPQLNNNVPMQKKLSLPEIPSYGFLVPRGTFPLDEDVSYKVPSSFLIPRVEQQNTKPNIYDIPKATSSVSQAGKELEKAKEVSENSAGHNSSWFSRRTTSPSPEPDRLSGSSSDSRASIVSSCSTTSTDDSSSSSSEESAKELSLDLDVAKETVMALQHKVVSSVAGLMLFVSRKWRFRDYLEANIDAIHRSTDHIEESVREFLDFARGVHGTACNLTDSNLQNRIRDQMQTISNSYRILLETKESLDNRNWPLEVLVTDSVQNSPDDLERFVMVARMLPEDIKRFASIVIANGRLLFKRNCEKEETVQLTPNAEFKCEKYIQPPQRETESHQKSTPSTKQREDEHSSELLKKNRANICGQNPGPLIPQPSSQQTPERKPRLSEHCRLYFGALFKAISAFHGSLSSSQPAEIITQSKLVIMVGQKLVDTLCMETQERDVRNEILRGSSHLCSLLKDVALATKNAVLTYPSPAALGHLQAEAEKLEQHTRQFRGTLG

SEQ ID NO: 100 - protein, 491 aa, Homo sapiens;
MDHTDNELQGTNSSGSLGGLDVRRRIPIKLISKQANKAKPAPRTQRTINRMPAKAPPGDEEGFDYNEEERYDCKGGELFANQRRFPGHLFWDFQINILGEKDDTPVHFCDKCGLPIKIYGRMIPCKHVFCYDCAILHEKKGDKMCPGCSDPVQRIEQCTRGSLFMCSIVQGCKRTYLSQRDLQAHINHRHMRAGKPVTRASLENVHPPIAPPPTEIPERFIMPPDKHHMSHIPPKQHIMMPPPPLQHVPHEHYNQPHEDIRAPPAELSMAPPPPRSVSQETFRISTRKHSNLITVPIQDDSNSGAREPPPPAPAPAHHHPEYQGQPVVSHPHHIMPPQQHYAPPPPPPPPISHPMPHPPQAAGTPHLVYSQAPPPPMTSAPPPITPPPGHIIAQMPPYMNHPPPGPPPPQHGGPPVTAPPPHHYNPNSLPQFTEDQGTLSPPFTQPGGMSPGIWPAPRGPPPPPRLQGPPSQTPLPGPHHPDQTRYRPYYQ

SEQ ID NO: 101 - protein, 580 aa, Homo sapiens;
MKENKENSSPSVTSANLDHTKPCWYWDKKDLAHTPSQLEGLDPATEARYRREGARFIFDVGTRLGLHYDTLATGIIYFHRFYMFHSFKQFPRYVTGACCLFLAGKVEETPKKCKDIIKTARSLLNDVQFGQFGDDPKEEVMVLERILLQTIKFDLQVEHPYQFLLKYAKQLKGDKNKIQKLVQMAWTFVNDSLCTTLSLQWEPEIIAVAVMYLAGRLCKFEIQEWTSKPMYRRWWEQFVQDVPVDVLEDICHQILDLYSQGKQQMPHHTPHQLQQPPSLQPTPQVPQVQQSQPSQSSEPSQPQQKDPQQPAQQQQPAQQPKKPSPQPSSPRQVKRAVVVSPKEENKAAEPPPPKIPKIETTHPPLPPAHPPPDRKPPLAAALGEAEPPGPVDATDLPKVQIPPPAHPAPVHQPPPLPHRPPPPPPSSYMTGMSTTSSYMSGEGYQSLQSMMKTEGPSYGALPPAYGPPAHLPYHPHVYPPNPPPPPVPPPPASFPPPAIPPPTPGYPPPPPTYNPNFPPPPPRLPPTHAVPPHPPPGLGLPPASYPPPAVPPGGQPPVPPPIPPPGMPPVGGLGRAAWMR

SEQ ID NO: 102 - protein, 267 aa, Homo sapiens;
MGSACIKVTKYFLFLFNLIFFILGAVILGFGVWILADKSSFISVLQTSSSSLRMGAYVFIGVGAVTMLMGFLGCIGAVNEVRCLLGLYFAFLLLILIAQVTAGALFYFNMGKLKQEMGGIVTELIRDYNSSREDSLQDAWDYVQAQVKCCGWVSFYNWTDNAELMNRPEVTYPCSCEVKGEEDNSLSVRKGFCEAPGNRTQSGNHPEDWPVYQEGCMEKVQAWLQENLGIILGVGVGVAIIELLGMVLSICLCRHVHSEDYSKVPKY

SEQ ID NO: 103 - protein, 201 aa, Homo sapiens;
MEYHPDLENLDEDGYTQLHFDSQSNTRIAVVSEKGSCAASPPWRLIAVILGILCLVILVIAVVLGTMGVLSSPCPPNWIIYEKSCYLFSMSLNSWDGSKRQCWQLGSNLLKIDSSNELGFIVKQVSSQPDNSFWIGLSRPQTEVPWLWEDGSTFSSNLFQIRTTATQENPSPNCVWIHVSVIYDQLCSVPSYSICEKKFSM

SEQ ID NO: 104 - protein, 707 aa, Homo sapiens;
MAAAVAAAGRLGWLFAALCLGNAAGEAAPGPRVLGFCLEEDGAAGAGWVRGGAARDTPDATFLLRLFGPGFANSSWSWVAPEGAGCREEAASPAGEWRALLRLRLRAEAVRPHSALLAVRVEPGGGAAEEAAPPWALGLGAAGLLALAALARGLQLSALALAPAEVQVLRESGSEAERAAARRLEPARRWAGCALGALLLLASLAQAALAVLLYRAAGQRAVPAVLGSAGLVFLVGEVVPAAVSGRWTLALAPRALGLSRLAVLLTLPVALPVGQLLELAARPGRLRERVLELARGGGDPYSDLSKGVLRCRTVEDVLTPLEDCFMLDASTVLDFGVLASIMQSGHTRIPVYEEERSNIVDMLYLKDLAFVDPEDCTPLSTITRFYNHPLHFVFNDTKLDAVLEEFKRGKSHLAIVQKVNNEGEGDPFYEVLGLVTLEDVIEEIIRSEILDESEDYRDTVVKRKPASLMAPLKRKEEFSLFKVSDDEYKVTISPQLLLATQRFLSREVDVFSPLRISEKVLLHLLKHPSVNQEVRFDESNRLATHHYLYQRSQPVDYFILILQGRVEVEIGKEGLKFENGAFTYYGVSALTVPSSVHQSPVSSLQPIRHDLQPDPGDGTHSSAYCPDYTVRALSDLQLIKVTRLQYLNALLATRAQNLPQSPENTDLQVIPGSQTRLLGEKTTTAAGSSHSRPGVPVEGSPGRNPGV

SEQ ID NO: 105 - protein, 388 aa, Homo sapiens;
MQRLLFPPLRALKGRQYLPLLAPRAAPRAQCDCIRRPLRPGQYSTISEVALQSGRGTVSLPSKAAERVVGRWLLVCSGTVAGAVILGGVTRLTESGLSMVDWHLIKEMKPPTSQEEWEAEFQRYQQFPEFKILNHDMTLTEFKFIWYMEYSHRMWGRLVGLVYILPAAYFWRKGWLSRGMKGRVLALCGLVCFQGLLGWYMVKSGLEEKSDSHDIPRVSQYRLAAHLGSALVLYCASLWTSLSLLLPPHKLPETHQLLQLRRFAHGTAGLVFLTALSGAFVAGLDAGLVYNSFPKMGESWIPEDLFTFSPILRNVFENPTMVQFDHRILGITSVTAITVLYFLSRRIPLPRRTKMAAVTLLALAYTQGPVLFNFTFKISDLDEGIRNI

SEQ ID NO: 106 - protein, 2039 aa, Homo sapiens;
MGASSPRSPEPVGPPAPGLPFCCGGSLLAVVVLLALPVAWGQCNAPEWLPFARPTNLTDEFEFPIGTYLNYECRPGYSGRPFSIICLKNSVWTGAKDRCRRKSCRNPPDPVNGMVHVIKGIQFGSQIKYSCTKGYRLIGSSSATCIISGDTVIWDNETPICDRIPCGLPPTITNGDFISTNRENFHYGSVVTYRCNPGSGGRKVFELVGEPSIYCTSNDDQVGIWSGPAPQCIIPNKCTPPNVENGILVSDNRSLFSLNEVVEFRCQPGFVMKGPRRVKCQALNKWEPELPSCSRVCQPPPDVLHAERTQRDKDNFSPGQEVFYSCEPGYDLRGAASMRCTPQGDWSPAAPTCEVKSCDDFMGQLLNGRVLFPVNLQLGAKVDFVCDEGFQLKGSSASYCVLAGMESLWNSSVPVCEQIFCPSPPVIPNGRHTGKPLEVFPFGKTVNYTCDPHPDRGTSFDLIGESTIRCTSDPQGNGVWSSPAPRCGILGHCQAPDHFLFAKLKTQTNASDFPIGTSLKYECRPEYYGRPFSITCLDNLVWSSPKDVCKRKSCKTPPDPVNGMVHVITDIQVGSRINYSCTTGHRLIGHSSAECILSGNAAHWSTKPPICQRIPCGLPPTIANGDFISTNRENFHYGSVVTYRCNPGSGGRKVFELVGEPSIYCTSNDDQVGIWSGPAPQCIIPNKCTPPNVENGILVSDNRSLFSLNEVVEFRCQPGFVMKGPRRVKCQALNKWEPELPSCSRVCQPPPDVLHAERTQRDKDNFSPGQEVFYSCEPGYDLRGAASMRCTPQGDWSPAAPTCEVKSCDDFMGQLLNGRVLFPVNLQLGAKVDFVCDEGFQLKGSSASYCVLAGMESLWNSSVPVCEQIFCPSPPVIPNGRHTGKPLEVFPFGKAVNYTCDPHPDRGTSFDLIGESTIRCTSDPQGNGVWSSPAPRCGILGHCQAPDHFLFAKLKTQTNASDFPIGTSLKYECRPEYYGRPFSITCLDNLVWSSPKDVCKRKSCKTPPDPVNGMVHVITDIQVGSRINYSCTTGHRLIGHSSAECILSGNTAHWSTKPPICQRIPCGLPPTIANGDFISTNRENFHYGSVVTYRCNLGSRGRKVFELVGEPSIYCTSNDDQVGIWSGPAPQCIIPNKCTPPNVENGILVSDNRSLFSLNEVVEFRCQPGFVMKGPRRVKCQALNKWEPELPSCSRVCQPPPEILHGEHTPSHQDNFSPGQEVFYSCEPGYDLRGAASLHCTPQGDWSPEAPRCAVKSCDDFLGQLPHGRVLFPLNLQLGAKVSFVCDEGFRLKGSSVSHCVLVGMRSLWNNSVPVCEHIFCPNPPAILNGRHTGTPSGDIPYGKEISYTCDPHPDRGMTFNLIGESTIRCTSDPHGNGVWSSPAPRCELSVRAGHCKTPEQFPFASPTIPINDFEFPVGTSLNYECRPGYFGKMFSISCLENLVWSSVEDNCRRKSCGPPPEPFNGMVHINTDTQFGSTVNYSCNEGFRLIGSPSTTCLVSGNNVTWDKKAPICEIISCEPPPTISNGDFYSNNRTSFHNGTVVTYQCHTGPDGEQLFELVGERSIYCTSKDDQVGVWSSPPPRCISTNKCTAPEVENAIRVPGNRSFFTLTEIIRFRCQPGFVMVGSHTVQCQTNGRWGPKLPHCSRVCQPPPEILHGEHTLSHQDNFSPGQEVFYSCEPSYDLRGAASLHCTPQGDWSPEAPRCTVKSCDDFLGQLPHGRVLLPLNLQLGAKVSFVCDEGFRLKGRSASHCVLAGMKALWNSSVPVCEQIFCPNPPAILNGRHTGTPFGDIPYGKEISYACDTHPDRGMTFNLIGESSIRCTSDPQGNGVWSSPAPRCELSVPAACPHPPKIQNGHYIGGHVSLYLPGMTISYICDPGYLLVGKGFIFCTDQGIWSQLDHYCKEVNCSFPLFMNGISKELEMKKVYHYGDYVTLKCEDGYTLEGSPWSQCQADDRWDPPLAKCTSRTHDALIVGTLSGTIFFILLIIFLSWIILKHRKGNNAHENPKEVAIHLHSQGGSSVHPRTLQTNEENSRVLP

SEQ ID NO: 107 - protein, 1198 aa, Homo sapiens;
MRSLRKKREKPRPEQWKGLPGPPRAPEPEDVAVPGGVDLLTLPQLCFPGGVCVATEPKEDCVHFLVLTDVCGNRTYGVVAQYYRPLHDEYCFYNGKTHRECPGCFVPFAVCVVSRFPYYNSLKDCLSCLLALLKPCKDFEVDSHIKDFAAKLSLIPSPPPGPLHLVFNMKSLQIVLPARADPESPILDLDLHLPLLCFRPEKVLQILTCILTEQRIVFFSSDWALLTLVTECFMAYLYPLQWQHPFVPILSDQMLDFVMAPTSFLMGCHLDHFEEVSKEADGLVLINIDHGSITYSKSTDDNVDIPDVPLLAAQTFIQRVQSLQLHHELHAAHLLSSTDLKEGRAHRRSWQQKLNCQIQQTTLQLLVSIFRDVKNHLNYEHRVFNSEEFLKTRAPGDHQFYKQVLDTYMFHSFLKARLNRRMDAFAQMDLDTQSEEDRINGMLLSPRRPTVEKRASRKSSHLHVTHRRMVVSMPNLQDIAMPELAPRNSSLRLTDTAGCRGSSAVLNVTPKSPYTFKIPEIHFPLESKCVQAYHAHFVSMLSEAMCFLAPDNSLLLARYLYLRGLVYLMQGQLLNALLDFQNLYKTDIRIFPTDLVKRTVESMSAPEWEGAEQAPELMRLISEILDKPHEASKLDDHVKKFKLPKKHMQLGDFMKRVQESGIVKDASIIHRLFEALTVGQEKQIDPETFKDFYNCWKETEAEAQEVSLPWLVMEHLDKNECVCKLSSSVKTNLGVGKIAMTQKRLFLLTEGRPGYLEISTFRNIEEVRRTTTTFLLRRIPTLKIRVASKKEVFEANLKTECDLWHLMVKEMWAGKKLADDHKDPHYVQQALTNVLLMDAVVGTLQSPGAIYAASKLSYFDKMSNEMPMTLPETTLETLKHKINPSAGEAFPQAVDVLLYTPGHLDPAEKVEDAHPKLWCALSEGKVTVFNASSWTIHQHSFKVGTAKVNCMVMADQNQVWVGSEDSVIYIINVHSMSCNKQLTAHCSSVTDLIVQDGQEAPSNVYSCSMDGMVLVWNVSTLQVTSRFQLPRGGLTSIRLHGGRLWCCTGNSIMVMKMNGSLHQELKIEENFKDTSTSFLAFQLLPEEEQLWAACAGRSEVYIWSLKDLAQPPQRVPLEDCSEINCMIRVKKQVWVGSRGLGQGTPKGKIYVIDAERKTVEKELVAHMDTVRTLCSAEDRYVLSGSGREEGKVAIWKGE

SEQ ID NO: 108 - protein, 1870 aa, Homo sapiens;
MARWIPTKRQKYGVAIYNYNASQDVELSLQIGDTVHILEMYEGWYRGYTLQNKSKKGIFPETYIHLKEATVEDLGQHETVIPGELPLVQELTSTLREWAVIWRKLYVNNKLTLFRQLQQMTYSLIEWRSQILSGTLPKDELAELKKKVTAKIDHGNRMLGLDLVVRDDNGNILDPDETSTIALFKAHEVASKRIEEKIQEEKSILQNLDLRGQSIFSTIHTYGLYVNFKNFVCNIGEDAELFMALYDPDQSTFISENYLIRWGSNGMPKEIEKLNNLQAVFTDLSSMDLIRPRVSLVCQIVRVGHMELKEGKKHTCGLRRPFGVAVMDITDIIHGKVDDEEKQHFIPFQQIAMETYIRQRQLIMSPLITSHVIGENEPLTSVLNKVIAAKEVNHKGQGLWVSLKLLPGDLTQVQKNFSHLVDRSTAIARKMGFPEIILPGDVRNDIYVTLIHGEFDKGKKKTPKNVEVTMSVHDEEGKLLEKAIHPGAGYEGISEYKSVVYYQVKQPCWYETVKVSIAIEEVTRCHIRFTFRHRSSQETRDKSERAFGVAFVKLMNPDGTTLQDGRHDLVVYKGDNKKMEDAKFYLTLPGTKMEMEEKELQASKNLVTFTPSKDSTKDSFQIATLICSTKLTQNVDLLGLLNWRSNSQNIKHNLKKLMEVDGGEIVKFLQDTLDALFNIMMEMSDSETYDFLVFDALVFIISLIGDIKFQHFNPVLETYIYKHFSATLAYVKLSKVLNFYVANADDSSKTELLFAALKALKYLFRFIIQSRVLYLRFYGQSKDGDEFNNSIRQLFLAFNMLMDRPLEEAVKIKGAALKYLPSIINDVKLVFDPVELSVLFCKFIQSIPDNQLVRQKLNCMTKIVESTLFRQSECREVLLPLLTDQLSGQLDDNSNKPDHEASSQLLSNILEVLDRKDVGATAVHIQLIMERLLRRINRTVIGMNRQSPHIGSFVACMIALLQQMDDSHYSHYISTFKTRQDIIDFLMETFIMFKDLIGKNVYAKDWMVMNMTQNRVFLRAINQFAEVLTRFFMDQASFELQLWNNYFHLAVAFLTHESLQLETFSQAKRNKIVKKYGDMRKEIGFRIRDMWYNLGPHKIKFIPSMVGPILEVTLTPEVELRKATIPIFFDMMQCEFNFSGNGNFHMFENELITKLDQEVEGGRGDEQYKVLLEKLLLEHCRKHKYLSSSGEVFALLVSSLLENLLDYRTIIMQDESKENRMSCTVNVLNFYKEKKREDIYIRYLYKLRDLHRDCENYTEAAYTLLLHAELLQWSDKPCVPHLLQKDSYYVYTQQELKEKLYQEIISYFDKGKMWEKAIKLSKELAETYESKVFDYEGLGNLLKKRASFYENIIKAMRPQPEYFAVGYYGQGFPSFLRNKIFIYRGKEYERREDFSLRLLTQFPNAEKMTSTTPPGEDIKSSPKQYMQCFTVKPVMSLPPSYKDKPVPEQILNYYRANEVQQFRYSRPFRKGEKDPDNEFATMWIERTTYTTAYTFPGILKWFEVKQISTEEISPLENAIETMELTNERISNCVQQHAWDRSLSVHPLSMLLSGIVDPAVMGGFSNYEKAFFTEKYLQEHPEDQEKVELLKRLIALQMPLLTEGIRIHGEKLTEQLKPLHERLSSCFRELKEKVEKHYGVITLPPNLTERKQSRTGSIVLPYIMSSTLRRLSITSVTSSVVSTSSNSSDNAPSRPGSDGSILEPLLERRASSGARVEDLSLREENSENRISKFKRKDWSLSKSQVIAEKAPEPDLMSPTRKAQRPKSLQLMDNRLSPFHGSSPPQSTPLSPPPLTPKATRTLSSPSLQTDGIAATPVPPPPPPKSKPYEGSQRNSTELAPPLPVRREAKAPPPPPPKARKSGIPTSEPGSQ

SEQ ID NO: 109 - protein, 604 aa, Homo sapiens;
MARISFSYLCPASWYFTVPTVSPFLRQRVAFLGLFFISCLLLLMLIIDFRHWSASLPRDRQYERYLARVGELEATDTEDPNLNYGLVVDCGSSGSRIFVYFWPRHNGNPHDLLDIKQMRDRNSQPVVKKIKPGISAMADTPEHASDYLRPLLSFAAAHVPVKKHKETPLYILCTAGMRLLPERKQLAILADLVKDLPLEFDFLFSQSQAEVISGKQEGVYAWIGINFVLGRFDHEDESDAEATQELAAGRRRTVGILDMGGASLQIAYEVPTSTSVLPAKQEEAAKILLAEFNLGCDVQHTEHVYRVYVTTFLGFGGNFARQRYEDLVLNETLNKNRLLGQKTGLSPDNPFLDPCLPVGLTDVVERNSQVLHVRGRGDWVSCGAMLSPLLARSNTSQASLNGIYQSPIDFNNSEFYGFSEFFYCTEDVLRIGGRYHGPTFAKAAQDYCGMAWSVLTQRFKNGLFSSHADEHRLKYQCFKSAWMYQVLHEGFHFPYDYPNLRTAQLVYDREVQWTLGAILYKTRFLPLRDLRQEGVRQAHGSWFRLSFVYNHYLFFACILVVLLAIFLYLLRLRRIHHRQTRASAPLDLLWLEEVVPMMGVQVGP

SEQ ID NO: 110 - protein, 987 aa, Homo sapiens;
MELRVLLCWASLAAALEETLLNTKLETADLKWVTFPQVDGQWEELSGLDEEQHSVRTYEVCDVQRAPGQAHWLRTGWVPRRGAVHVYATLRFTMLECLSLPRAGRSCKETFTVFYYESDADTATALTPAWMENPYIKVDTVAAEHLTRKRPGAEATGKVNVKTLRLGPLSKAGFYLAFQDQGACMALLSLHLFYKKCAQLTVNLTRFPETVPRELVVPVAGSCVVDAVPAPGPSPSLYCREDGQWAEQPVTGCSCAPGFEAAEGNTKCRACAQGTFKPLSGEGSCQPCPANSHSNTIGSAVCQCRVGYFRARTDPRGAPCTTPPSAPRSVVSRLNGSSLHLEWSAPLESGGREDLTYALRCRECRPGGSCAPCGGDLTFDPGPRDLVEPWVVVRGLRPDFTYTFEVTALNGVSSLATGPVPFEPVNVTTDREVPPAVSDIRVTRSSPSSLSLAWAVPRAPSGAVLDYEVKYHEKGAEGPSSVRFLKTSENRAELRGLKRGASYLVQVRARSEAGYGPFGQEHHSQTQLDESEGWREQLALIAGTAVVGVVLVLVVIVVAVLCLRKQSNGREAEYSDKHGQYLIGHGTKVYIDPFTYEDPNEAVREFAKEIDVSYVKIEEVIGAGEFGEVCRGRLKAPGKKESCVAIKTLKGGYTERQRREFLSEASIMGQFEHPNIIRLEGVVTNSMPVMILTEFMENGALDSFLRLNDGQFTVIQLVGMLRGIASGMRYLAEMSYVHRDLAARNILVNSNLVCKVSDFGLSRFLEENSSDPTYTSSLGGKIPIRWTAPEAIAFRKFTSASDAWSYGIVMWEVMSFGERPYWDMSNQDVINAIEQDYRLPPPPDCPTSLHQLMLDCWQKDRNARPRFPQVVSALDKMIRNPASLKIVARENGGASHPLLDQRQPHYSAFGSVGEWLRAIKMGRYEESFAAAGFGSFELVSQISAEDLLRIGVTLAGHQKKILASVQHMKSQAKPGTPGGTGGPAPQY

SEQ ID NO: 111 - protein, 919 aa, Homo sapiens;
MTGYTMLRNGGAGNGGQTCMLRWSNRIRLTWLSFTLFVILVFFPLIAHYYLTTLDEADEAGKRIFGPRVGNELCEVKHVLDLCRIRESVSEELLQLEAKRQELNSEIAKLNLKIEACKKSIENAKQDLLQLKNVISQTEHSYKELMAQNQPKLSLPIRLLPEKDDAGLPPPKATRGCRLHNCFDYSRCPLTSGFPVYVYDSDQFVFGSYLDPLVKQAFQATARANVYVTENADIACLYVILVGEMQEPVVLRPAELEKQLYSLPHWRTDGHNHVIINLSRKSDTQNLLYNVSTGRAMVAQSTFYTVQYRPGFDLVVSPLVHAMSEPNFMEIPPQVPVKRKYLFTFQGEKIESLRSSLQEARSFEEEMEGDPPADYDDRIIATLKAVQDSKLDQVLVEFTCKNQPKPSLPTEWALCGEREDRLELLKLSTFALIITPGDPRLVISSGCATRLFEALEVGAVPVVLGEQVQLPYQDMLQWNEAALVVPKPRVTEVHFLLRSLSDSDLLAMRRQGRFLWETYFSTADSIFNTVLAMIRTRIQIPAAPIREEAAAEIPHRSGKAAGTDPNMADNGDLDLGPVETEPPYASPRYLRNFTLTVTDFYRSWNCAPGPFHLFPHTPFDPVLPSEAKFLGSGTGFRPIGGGAGGSGKEFQAALGGNVPREQFTVVMLTYEREEVLMNSLERLNGLPYLNKVVVVWNSPKLPSEDLLWPDIGVPIMVVRTEKNSLNNRFLPWNEIETEAILSIDDDAHLRHDEIMFGFRVWREARDRIVGFPGRYHAWDIPHQSWLYNSNYSCELSMVLTGAAFFHKYYAYLYSYVMPQAIRDMVDEYINCEDIAMNFLVSHITRKPPIKVTSRWTFRCPGCPQALSHDDSHFHERHKCINFFVKVYGYMPLLYTQFRVDSVLFKTRLPHDKTKCFKFI

SEQ ID NO: 112 - protein, 928 aa, Homo sapiens;
MGGSASSQLDEGKCAYIRGKTEAAIKNFSPYYSRQYSVAFCNHVRTEVEQQRDLTSQFLKTKPPLAPGTILYEAELSQFSEDIKKWKERYVVVKNDYAVESYENKEAYQRGAAPKCRILPAGGKVLTSEDEYNLLSDRHFPDPLASSEKENTQPFVVLPKEFPVYLWQPFFRHGYFCFHEAADQKRFSALLSDCVRHLNHDYMKQMTFEAQAFLEAVQFFRQEKGHYGSWEMITGDEIQILSNLVMEELLPTLQTDLLPKMKGKKNDRKRTWLGLLEEAYTLVQHQVSEGLSALKEECRALTKGLEGTIRSDMDQIVNSKNYLIGKIKAMVAQPAEKSCLESVQPFLASILEELMGPVSSGFSEVRVLFEKEVNEVSQNFQTTKDSVQLKEHLDRLMNLPLHSVKMEPCYTKVNLLHERLQDLKSRFRFPHIDLVVQRTQNYMQELMENAVFTFEQLLSPHLQGEASKTAVAIEKVKLRVLKQYDYDSSTIRKKIFQEALVQITLPTVQKALASTCKPELQKYEQFIFADHTNMIHVENVYEEILHQILLDETLKVIKEAAILKKHNLFEDNMALPSESVSSLTDLKPPTGSNQASPARRASAILPGVLGSETLSNEVFQESEEEKQPEVPSSLAKGESLSLPGPSPPPDGTEQVIISRVDDPVVNPVATEDTAGLPGTCSSELEFGGTLEDEEPAQEEPEPITASGSLKALRKLLTASVEVPVDSAPVMEEDTNGESHVPQENEEEEEKEPSQAAAIHPDNCEESEVSEREAQPPCPEAHGEELGGFPEVGSPASPPASGGLTEEPLGPMEGELPGEACTLTAHEGRGGKCTEEGDASQQEGCTLGSDPICLSESQVSEEQEEMGGQSSAAQATASVNAEEIKVARIHECQWVVEDAPNPDVLLSHKDDVKEGEGGQESFPELPSEE

SEQ ID NO: 113 - protein, 368 aa, Homo sapiens;
MAAAAEERMAEEGGGGQGDGGSSLASGSTQRQPPPPAPQHPQPGSQALPAPALAPDQLPQNNTLVALPIVAIENILSFMSYDEISQLRLVCKRMDLVCQRMLNQGFLKVERYHNLCQKQVKAQLPRRESERRNHSLARHADILAAVETRLSLLNMTFMKYVDSNLCCFIPGKVIDEIYRVLRYVNSTRAPQRAHEVLQELRDISSMAMEYFDEKIVPILKRKLPGSDVSGRLMGSPPVPGPSAALTTMQLFSKQNPSRQEVTKLQQQVKTNGAGVTVLRREISELRTKVQEQQKQLQDQDQKLLEQTQIIGEQNARLAELERKLREVMESAVGNSSGSGQNEESPRKRKKATEAIDSLRKSKRLRNRK

SEQ ID NO: 114 - protein, 907 aa, Homo sapiens;
MPTAAAPIISSVQKLVLYETRARYFLVGSNNAETKYRVLKIDRTEPKDLVIIDDRHVYTQQEVRELLGRLDLGNRTKMGQKGSSGLFRAVSAFGVVGFVRFLEGYYIVLITKRRKMADIGGHAIYKVEDTNMIYIPNDSVRVTHPDEARYLRIFQNVDLSSNFYFSYSYDLSHSLQYNLTVLRMPLEMLKSEMTQNRQESFDIFEDEGLITQGGSGVFGICSEPYMKYVWNGELLDIIKSTVHRDWLLYIIHGFCGQSKLLIYGRPVYVTLIARRSSKFAGTRFLKRGANCEGDVANEVETEQILCDASVMSFTAGSYSSYVQVRGSVPLYWSQDISTMMPKPPITLDQADPFAHVAALHFDQMFQRFGSPIIILNLVKEREKRKHERILSEELVAAVTYLNQFLPPEHTIVYIPWDMAKYTKSKLCNVLDRLNVIAESVVKKTGFFVNRPDSYCSILRPDEKWNELGGCVIPTGRLQTGILRTNCVDCLDRTNTAQFMVGKCALAYQLYSLGLIDKPNLQFDTDAVRLFEELYEDHGDTLSLQYGGSQLVHRVKTYRKIAPWTQHSKDIMQTLSRYYSNAFSDADRQDSINLFLGVFHPTEGKPHLWELPTDFYLHHKNTMRLLPTRRSYTYWWTPEVIKHLPLPYDEVICAVNLKKLIVKKFHKYEEEIDIHNEFFRPYELSSFDDTFCLAMTSSARDFMPKTVGIDPSPFTVRKPDETGKSVLGNKSNREEAVLQRKTAASAPPPPSEEAVSSSSEDDSGTDREEEGSVSQRSTPVKMTDAGDSAKVTENVVQPMKELYGINLSDGLSEEDFSIYSRFVQLGQSQHKQDKNSQQPCSRCSDGVIKLTPISAFSQDNIYEVQPPRVDRKSTEIFQAHIQASQGIMQPLGKEDSSMYREYIRNRYL

SEQ ID NO: 115 - protein, 622 aa, Homo sapiens;
MGLYGQACPSVTSLRMTSELESSLTSMDWLPQLTMRAAIQKSDATQNAHGTGISKKNALLDPNTTLDQEEVQQHKDGKPPYSYASLITFAINSSPKKKMTLSEIYQWICDNFPYYREAGSGWKNSIRHNLSLNKCFLKVPRSKDDPGKGSYWAIDTNPKEDVLPTRPKKRARSVERASTPYSIDSDSLGMECIISGSASPTLAINTVTNKVTLYNTDQDGSDSPRSSLNNSLSDQSLASVNLNSVGSVHSYTPVTSHPESVSQSLTPQQQPQYNLPERDKQLLFSEYNFEDLSASFRSLYKSVFEQSLSQQGLMNIPSESSQQSHTSCTYQHSPSSTVSTHPHSNQSSLSNSHGSGLNTTGSNSVAQVSLSHPQMHTQPSPHPPHRPHGLPQHPQRSPHPAPHPQQHSQLQSPHPQHPSPHQHIQHHPNHQHQTLTHQAPPPPQQVSCNSGVSNDWYATLDMLKESCRIASSVNWSDVDLSQFQGLMESMRQADLKNWSLDQVQFADLCSSLNQFFTQTGLIHSQSNVQQNVCHGAMHPTKPSQHIGTGNLYIDSRQNLPPSVMPPPGYPHIPQALSTPGTTMAGHHRAMNQQHMMPSQAFQMRRSLPPDDIQDDFDWDSIV

SEQ ID NO: 116 - protein, 638 aa, Homo sapiens;
MSGDPDVLEYYKNDHSKKPLRIINLNFCEQVDAGLTFNKKELQDSFVFDIKTSERTFYLVAETEEDMNKWVQSICQICGFNQAEESTDSLRNVSSAGHGPRSSPAELSSSSQHLLRERKSSAPSHSSQPTLFTFEPPVSNHMQPTLSTSAPQEYLYLHQCISRRAENARSASFSQGTRASFLMRSDTAVQKLAQGNGHCVNGISGQVHGFYSLPKPSRHNTEFRDSTYDLPRSLASHGHTKGSLTGSETDNEDVYTFKTPSNTLCREFGDLLVDNMDVPATPLSAYQIPRTFTLDKNHNAMTVATPGDSAIAPPPRPPKPSQAETPRWGSPQQRPPISENSRSVAATIPRRNTLPAMDNSRLHRASSCETYEYPQRGGESAGRSAESMSDGVGSFLPGKMIVGRSDSTNSEDNYVPMNPGSSTLLAMERAGDNSQSVYIPMSPGAHHFDSLGYPSTTLPVHRGPSRGSEIQPPPVNRNLKPDRKAKPTPLDLRNNTVIDELPFKSPITKSWSRANHTFNSSSSQYCRPISTQSITSTDSGDSEENYVPMQNPVSASPVPSGTNSPAPKKSTGSVDYLALDFQPSSPSPHRKPSTSSVTSDEKVDYVQVDKEKTQALQNTMQEWTDVRQSSEPSKGAKL

SEQ ID NO: 117 - protein, 571 aa, Homo sapiens;
MRRRSRMLLCFAFLWVLGIAYYMYSGGGSALAGGAGGGAGRKEDWNEIDPIKKKDLHHSNGEEKAQSMETLPPGKVRWPDFNQEAYVGGTMVRSGQDPYARNKFNQVESDKLRMDRAIPDTRHDQCQRKQWRVDLPATSVVITFHNEARSALLRTVVSVLKKSPPHLIKEIILVDDYSNDPEDGALLGKIEKVRVLRNDRREGLMRSRVRGADAAQAKVLTFLDSHCECNEHWLEPLLERVAEDRTRVVSPIIDVINMDNFQYVGASADLKGGFDWNLVFKWDYMTPEQRRSRQGNPVAPIKTPMIAGGLFVMDKFYFEELGKYDMMMDVWGGENLEISFRVWQCGGSLEIIPCSRVGHVFRKQHPYTFPGGSGTVFARNTRRAAEVWMDEYKNFYYAAVPSARNVPYGNIQSRLELRKKLSCKPFKWYLENVYPELRVPDHQDIAFGALQQGTNCLDTLGHFADGVVGVYECHNAGGNQEWALTKEKSVKHMDLCLTVVDRAPGSLIKLQGCRENDSRQKWEQIEGNSKLRHVGSNLCLDSRTAKSGGLSVEVCGPALSQQWKFTLNLQQ

SEQ ID NO: 118 - protein, 336 aa, Homo sapiens;
MSNMENSFDDVSCLSPQNLGSSSPSKKQSKENTITINCVTFPHPDTMPEQQLLKPTEWSYCDYFWADKKDPQGNGTVAGFELLLQKQLKGKQMQKEMSEFIRERIKIEEDYAKNLAKLSQNSLASQEEGSLGEAWAQVKKSLADEAEVHLKFSAKLHSEVEKPLMNFRENFKKDMKKCDHHIADLRKQLASRYASVEKARKALTERQRDLEMKTQQLEIKLSNKTEEDIKKARRKSTQAGDDLMRCVDLYNQAQSKWFEEMVTTTLELERLEVERVEMIRQHLCQYTQLRHETDMFNQSTVEPVDQLLRKVDPAKDRELWVREHKTGNIRPVDMEI

SEQ ID NO: 119 - protein, 1684 aa, Homo sapiens;
MEDLVQDGVASPATPGTGKSKLETLPKEDLIKFAKKQMMLIQKAKSRCTELEKEIEELRSKPVTEGTGDIIKALTERLDALLLEKAETEQQCLSLKKENIKMKQEVEDSVTKMGDAHKELEQSHINYVKEIENLKNELMAVRSKYSEDKANLQKQLEEAMNTQLELSEQLKFQNNSEDNVKKLQEEIEKIRPGFEEQILYLQKQLDATTDEKKETVTQLQNIIEANSQHYQKNINSLQEELLQLKAIHQEEVKELMCQIEASAKEHEAEINKLNELKENLVKQCEASEKNIQKKYECELENLRKATSNANQDNQICSILLQENTFVEQVVNEKVKHLEDTLKELESQHSILKDEVTYMNNLKLKLEMDAQHIKDEFFHEREDLEFKINELLLAKEEQGCVIEKLKSELAGLNKQFCYTVEQHNREVQSLKEQHQKEISELNETFLSDSEKEKLTLMFEIQGLKEQCENLQQEKQEAILNYESLREIMEILQTELGESAGKISQEFESMKQQQASDVHELQQKLRTAFTEKDALLETVNRLQGENEKLLSQQELVPELENTIKNLQEKNGVYLLSLSQRDTMLKELEGKINSLTEEKDDFINKLKNSHEEMDNFHKKCEREERLILELGKKVEQTIQYNSELEQKVNELTGGLEETLKEKDQNDQKLEKLMVQMKVLSEDKEVLSAEVKSLYEENNKLSSEKKQLSRDLEVFLSQKEDVILKEHITQLEKKLQLMVEEQDNLNKLLENEQVQKLFVKTQLYGFLKEMGSEVSEDSEEKDVVNVLQAVGESLAKINEEKCNLAFQRDEKVLELEKEIKCLQEESVVQCEELKSLLRDYEQEKVLLRKELEEIQSEKEALQSDLLEMKNANEKTRLENQNLLIQVEEVSQTCSKSEIHNEKEKCFIKEHENLKPLLEQKELRDRRAELILLKDSLAKSPSVKNDPLSSVKELEEKIENLEKECKEKEEKINKIKLVAVKAKKELDSSRKETQTVKEELESLRSEKDQLSASMRDLIQGAESYKNLLLEYEKQSEQLDVEKERANNFEHRIEDLTRQLRNSTLQCETINSDNEDLLARIETLQSNAKLLEVQILEVQRAKAMVDKELEAEKLQKEQKIKEHATTVNELEELQVQLQKQKKQLQKTMQELELVKKDAQQTTLMNMEIADYERLMKELNQKLTNKNNKIEDLEQEIKIQKQKQETLQEEITSLQSSVQQYEEKNTKIKQLLVKTKKELADSKQAETDHLILQASLKGELEASQQQVEVYKIQLAEITSEKHKIHEHLKTSAEQHQRTLSAYQQRVTALQEECRAAKAEQATVTSEFESYKVRVHNVLKQQKNKSMSQAETEGAKQEREHLEMLIDQLKIKLQDSQNNLQINVSELQTLQSEHDTLLERHNKMLQETVSKEAELREKLCSIQSENMMMKSEHTQTVSQLTSQNEVLRNSFRDQVRHLQEEHRKTVETLQQQLSKMEAQLFQLKNEPTTRSPVSSQQSLKNLRERRNTDLPLLDMHTVTREEGEGMETTDTESVSSASTYTQSLEQLLNSPETKLEPPLWHAEFTKEELVQKLSSTTKSADHLNGLLRETEATNAILMEQIKLLKSEIRRLERNQEREKSAANLEYLKNVLLQFIFLKPGSERERLLPVINTMLQLSPEEKGKLAAVAQGEEENASRSSGWASYLHSWSGLR

SEQ ID NO: 120 - protein, 590 aa, Homo sapiens;
MELENIVANTVLLKAREGGGGKRKGKSKKWKEILKFPHISQCEDLRRTIDRDYCSLCDKQPIGRLLFRQFCETRPGLECYIQFLDSVAEYEVTPDEKLGEKGKEIMTKYLTPKSPVFIAQVGQDLVSQTEEKLLQKPCKELFSACAQSVHEYLRGEPFHEYLDSMFFDRFLQWKWLERQPVTKNTFRQYRVLGKGGFGEVCACQVRATGKMYACKRLEKKRIKKRKGESMALNEKQILEKVNSQFVVNLAYAYETKDALCLVLTIMNGGDLKFHIYNMGNPGFEEERALFYAAEILCGLEDLHRENTVYRDLKPENILLDDYGHIRISDLGLAVKIPEGDLIRGRVGTVGYMAPEVLNNQRYGLSPDYWGLGCLIYEMIEGQSPFRGRKEKVKREEVDRRVLETEEVYSHKFSEEAKSICKMLLTKDAKQRLGCQEEGAAEVKRHPFFRNMNFKRLEAGMLDPPFVPDPRAVYCKDVLDIEQFSTVKGVNLDHTDDDFYSKFSTGSVSIPWQNEMIETECFKELNVFGPNGTLPPDLNRNHPPEPPKKGLLQRLFKRQHQNNSKSSPSSKTSFNHHINSNHVSSNSTGSS

SEQ ID NO: 121 - protein, 657 aa, Homo sapiens;
MPRYTVHVRGEWLAVPCQDAQLTVGWLGREAVRRYIKNKPDNGGFTSVDDAHFLVRRCKGLGLLDNEDRLEVALENNEFVEVVIEGDAMSPDFIPSQPEGVYLYSKYREPEKYIELDGDRLTTEDLVNLGKGRYKIKLTPTAEKRVQKSREVIDSIIKEKTVVYGITTGFGKFARTVIPINKLQELQVNLVRSHSSGVGKPLSPERCRMLLALRINVLAKGYSGISLETLKQVIEMFNASCLPYVPEKGTVGASGDLAPLSHLALGLVGEGKMWSPKSGWADAKYVLEAHGLKPVILKPKEGLALINGTQMITSLGCEAVERASAIARQADIVAALTLEVLKGTTKAFDTDIHALRPHRGQIEVAFRFRSLLDSDHHPSEIAESHRFCDRVQDAYTLRCCPQVHGVVNDTIAFVKNIITTELNSATDNPMVFANRGETVSGGNFHGEYPAKALDYLAIGIHELAAISERRIERLCNPSLSELPAFLVAEGGLNSGFMIAHCTAAALVSENKALCHPSSVDSLSTSAATEDHVSMGGWAARKALRVIEHVEQVLAIELLAACQGIEFLRPLKTTTPLEKVYDLVRSVVRPWIKDRFMAPDIEAAHRLLLEQKVWEVAAPYIEKYRMEHIPESRPLSPTAFSLQFLHKKSTKIPESEDL

SEQ ID NO: 122 - protein, 486 aa, Homo sapiens;
MWKSVVGHDVSVSVETQGDDWDTDPDFVNDISEKEQRWGAKTIEGSGRTEHINIHQLRNKVSEEHDVLRKKEMESGPKASHGYGGRFGVERDRMDKSAVGHEYVAEVEKHSSQTDAAKGFGGKYGVERDRADKSAVGFDYKGEVEKHTSQKDYSRGFGGRYGVEKDKWDKAALGYDYKGETEKHESQRDYAKGFGGQYGIQKDRVDKSAVGFNEMEAPTTAYKKTTPIEAASSGTRGLKAKFESMAEEKRKREEEEKAQQVARRQQERKAVTKRSPEAPQPVIAMEEPAVPAPLPKKISSEAWPPVGTPPSSESEPVRTSREHPVPLLPIRQTLPEDNEEPPALPPRTLEGLQVEEEPVYEAEPEPEPEPEPEPENDYEDVEEMDRHEQEDEPEGDYEEVLEPEDSSFSSALAGSSGCPAGAGAGAVALGISAVAVYDYQGEGSDELSFDPDDVITDIEMVDEGWWRGRCHGHFGLFPANYVKLLE

SEQ ID NO: 123 - protein, 923 aa, Homo sapiens;
MDSIGSSGLRQGEETLSCSEEGLPGPSDSSELVQECLQQFKVTRAQLQQIQASLLGSMEQALRGQASPAPAVRMLPTYVGSTPHGTEQGDFVVLELGATGASLRVLWVTLTGIEGHRVEPRSQEFVIPQEVMLGAGQQLFDFAAHCLSEFLDAQPVNKQGLQLGFSFSFPCHQTGLDRSTLISWTKGFRCSGVEGQDVVQLLRDAIRRQGAYNIDVVAVVNDTVGTMMGCEPGVRPCEVGLVVDTGTNACYMEEARHVAVLDEDRGRVCVSVEWGSFSDDGALGPVLTTFDHTLDHESLNPGAQRFEKMIGGLYLGELVRLVLAHLARCGVLFGGCTSPALLSQGSILLEHVAEMEDPSTGAARVHAILQDLGLSPGASDVELVQHVCAAVCTRAAQLCAAALAAVLSCLQHSREQQTLQVAVATGGRVCERHPRFCSVLQGTVMLLAPECDVSLIPSVDGGGRGVAMVTAVAARLAAHRRLLEETLAPFRLNHDQLAAVQAQMRKAMAKGLRGEASSLRMLPTFVRATPDGSERGDFLALDLGGTNFRVLLVRVTTGVQITSEIYSIPETVAQGSGQQLFDHIVDCIVDFQQKQGLSGQSLPLGFTFSFPCRQLGLDQGILLNWTKGFKASDCEGQDVVSLLREAITRRQAVELNVVAIVNDTVGTMMSCGYEDPRCEIGLIVGTGTNACYMEELRNVAGVPGDSGRMCINMEWGAFGDDGSLAMLSTRFDASVDQASINPGKQRFEKMISGMYLGEIVRHILLHLTSLGVLFRGQQIQRLQTRDIFKTKFLSEIESDSLALRQVRAILEDLGLPLTSDDALMVLEVCQAVSQRAAQLCGAGVAAVVEKIRENRGLEELAVSVGVDGTLYKLHPRFSSLVAATVRELAPRCVVTFLQSEDGSGKGAALVTAVACRLAQLTRV

SEQ ID NO: 124 - protein, 632 aa, Homo sapiens;
MNRYTTIRQLGDGTYGSVLLGRSIESGELIAIKKMKRKFYSWEECMNLREVKSLKKLNHANVVKLKEVIRENDHLYFIFEYMKENLYQLIKERNKLFPESAIRNIMYQILQGLAFIHKHGFFHRDLKPENLLCMGPELVKIADFGLAREIRSKPPYTDYVSTRWYRAPEVLLRSTNYSSPIDVWAVGCIMAEVYTLRPLFPGASEIDTIFKICQVLGTPKKTDWPEGYQLSSAMNFRWPQCVPNNLKTLIPNASSEAVQLLRDMLQWDPKKRPTASQALRYPYFQVGHPLGSTTQNLQDSEKPQKGILEKAGPPPYIKPVPPAQPPAKPHTRISSRQHQASQPPLHLTYPYKAEVSRTDHPSHLQEDKPSPLLFPSLHNKHPQSKITAGLEHKNGEIKPKSRRRWGLISRSTKDSDDWADLDDLDFSPSLSRIDLKNKKRQSDDTLCRFESVLDLKPSEPVGTGNSAPTQTSYQRRDTPTLRSAAKQHYLKHSRYLPGISIRNGILSNPGKEFIPPNPWSSSGLSGKSSGTMSVISKVNSVGSSSTSSSGLTGNYVPSFLKKEIGSAMQRVHLAPIPDPSPGYSSLKAMRPHPGRPFFHTQPRSTPGLIPRPPAAQPVHGRTDWASKYASRR

SEQ ID NO: 125 - protein, 282 aa, Homo sapiens;
MERPSLRALLLGAAGLLLLLLPLSSSSSSDTCGPCEPASCPPLPPLGCLLGETRDACGCCPMCARGEGEPCGGGGAGRGYCAPGMECVKSRKRRKGKAGAAAGGPGVSGVCVCKSRYPVCGSDGTTYPSGCQLRAASQRAESRGEKAITQVSKGTCEQGPSIVTPPKDIWNVTGAQVYLSCEVIGIPTPVLIWNKVKRGHYGVQRTELLPGDRDNLAIQTRGGPEKHEVTGWVLVSPLSKEDAGEYECHASNSQGQASASAKITVVDALHEIPVKKGEGAEL

SEQ ID NO: 126 - protein, 557 aa, Homo sapiens;
MPERDSEPFSNPLAPDGHDVDDPHSFHQSKLTNEDFRKLLMTPRAAPTSAPPSKSRHHEMPREYNEDEDPAARRRKKKSYYAKLRQQEIERERELAEKYRDRAKERRDGVNKDYEETELISTTANYRAVGPTAEADKSAAEKRRQLIQESKFLGGDMEHTHLVKGLDFALLQKVRAEIASKEKEEEELMEKPQKETKKDEDPENKIEFKTRLGRNVYRMLFKSKAYERNELFLPGRMAYVVDLDDEYADTDIPTTLIRSKADCPTMEAQTTLTTNDIVISKLTQILSYLRQGTRNKKLKKKDKGKLEEKKPPEADMNIFEDIGDYVPSTTKTPRDKERERYRERERDRERDRDRDRERERERDRERERERDREREEEKKRHSYFEKPKVDDEPMDVDKGPGSTKELIKSINEKFAGSAGWEGTESLKKPEDKKQLGDFFGMSNSYAECYPATMDDMAVDSDEEVDYSKMDQGNKKGPLGRWDFDTQEEYSEYMNNKEALPKAAFQYGIKMSEGRKTRRFKETNDKAELDRQWKKISAIIEKRKKMEADGVEVKRPKY

SEQ ID NO: 127 - protein, 419 aa, Homo sapiens;
MGEKKPEPLDFVKDFQEYLTQQTHHVNMISGSVSGDKEAEALQGAGTDGDQNGLDHPSVEVSLDENSGMLVDGFERTFDGKLKCRYCNYASKGTARLIEHIRIHTGEKPHRCHLCPFASAYERHLEAHMRSHTGEKPYKCELCSFRCSDRSNLSHHRRRKHKMVPIKGTRSSLSSKKMWGVLQKKTSNLGYSRRALINLSPPSMVVQKPDYLNDFTHEIPNIQTDSYESMAKTTPTGGLPRDPQELMVDNPLNQLSTLAGQLSSLPPENQNPASPDVVPCPDEKPFMIQQPSTQAVVSAVSASIPQSSSPTSPEPRPSHSQRNYSPVAGPSSEPSAHTSTPSIGNSQPSTPAPALPVQDPQLLHHCQHCDMYFADNILYTIHMGCHGYENPFQCNICGCKCKNKYDFACHFARGQHNQH

SEQ ID NO: 128 - protein, 551 aa, Homo sapiens;
MAAPALSWRLPLLILLLPLATSWASAAVNGTSQFTCFYNSRANISCVWSQDGALQDTSCQVHAWPDRRRWNQTCELLPVSQASWACNLILGAPDSQKLTTVDIVTLRVLCREGVRWRVMAIQDFKPFENLRLMAPISLQVVHVETHRCNISWEISQASHYFERHLEFEARTLSPGHTWEEAPLLTLKQKQEWICLETLTPDTQYEFQVRVKPLQGEFTTWSPWSQPLAFRTKPAALGKDTIPWLGHLLVGLSGAFGFIILVYLLINCRNTGPWLKKVLKCNTPDPSKFFSQLSSEHGGDVQKWLSSPFPSSSFSPGGLAPEISPLEVLERDKVTQLLLQQDKVPEPASLSSNHSLTSCFTNQGYFFFHLPDALEIEACQVYFTYDPYSEEDPDEGVAGAPTGSSPQPLQPLSGEDDAYCTFPSRDDLLLFSPSLLGGPSPPSTAPGGSGAGEERMPPSLQERVPRDWDPQPLGPPTPGVPDLVDFQPPPELVLREAGEEVPDAGPREGVSFPWSRPPGQGEFRALNARLPLNTDAYLSLQELQGQDPTHLV

SEQ ID NO: 129 - protein, 599 aa, Homo sapiens;
MEGPLTPPPLQGGGAAAVPEPGARQHPGHETAAQRYSARLLQAGYEPESPRLDLATHPTTPRSELSSVVLLAGVGVQMDRLRRASMADYLISGGTGYVPEDGLTAQQLFASADGLTYNDFLILPGFIDFIADEVDLTSALTRKITLKTPLISSPMDTVTEADMAIAMALMGGIGFIHHNCTPEFQANEVRKVKKFEQGFITDPVVLSPSHTVGDVLEAKMRHGFSGIPITETGTMGSKLVGIVTSRDIDFLAEKDHTTLLSEVMTPRIELVVAPAGVTLKEANEILQRSKKGKLPIVNDCDELVAIIARTDLKKNRDYPLASKDSQKQLLCGAAVGTREDDKYRLDLLTQAGVDVIVLDSSQGNSVYQIAMVHYIKQKYPHLQVIGGNVVTAAQAKNLIDAGVDGLRVGMGCGSICITQEVMACGRPQGTAVYKVAEYARRFGVPIIADGGIQTVGHVVKALALGASTVMMGSLLAATTEAPGEYFFSDGVRLKKYRGMGSLDAMEKSSSSQKRYFSEGDKVKIAQGVSGSIQDKGSIQKFVPYLIAGIQHGCQDIGARSLSVLRSMMYSGELKFEKRTMSAQIEGGVHGLHSYEKRLY

SEQ ID NO: 130 - protein, 1188 aa, Homo sapiens;
MVPCWNHGNITRSKAEELLSRTGKDGSFLVRASESISRAYALCVLYRNCVYTYRILPNEDDKFTVQASEGVSMRFFTKLDQLIEFYKKENMGLVTHLQYPVPLEEEDTGDDPEEDTESVVSPPELPPRNIPLTASSCEAKEVPFSNENPRATETSRPSLSETLFQRLQSMDTSGLPEEHLKAIQDYLSTQLAQDSEFVKTGSSSLPHLKKLTTLLCKELYGEVIRTLPSLESLQRLFDQQLSPGLRPRPQVPGEANPINMVSKLSQLTSLLSSIEDKVKALLHEGPESPHRPSLIPPVTFEVKAESLGIPQKMQLKVDVESGKLIIKKSKDGSEDKFYSHKKILQLIKSQKFLNKLVILVETEKEKILRKEYVFADSKKREGFCQLLQQMKNKHSEQPEPDMITIFIGTWNMGNAPPPKKITSWFLSKGQGKTRDDSADYIPHDIYVIGTQEDPLSEKEWLEILKHSLQEITSVTFKTVAIHTLWNIRIVVLAKPEHENRISHICTDNVKTGIANTLGNKGAVGVSFMFNGTSLGFVNSHLTSGSEKKLRRNQNYMNILRFLALGDKKLSPFNITHRFTHLFWFGDLNYRVDLPTWEAETIIQKIKQQQYADLLSHDQLLTERREQKVFLHFEEEEITFAPTYRFERLTRDKYAYTKQKATGMKYNLPSWCDRVLWKSYPLVHVVCQSYGSTSDIMTSDHSPVFATFEAGVTSQFVSKNGPGTVDSQGQIEFLRCYATLKTKSQTKFYLEFHSSCLESFVKSQEGENEEGSEGELVVKFGETLPKLKPIISDPEYLLDQHILISIKSSDSDESYGEGCIALRLEATETQLPIYTPLTHHGELTGHFQGEIKLQTSQGKTREKLYDFVKTERDESSGPKTLKSLTSHDPMKQWEVTSRAPPCSGSSITEIINPNYMGVGPFGPPMPLHVKQTLSPDQQPTAWSYDQPPKDSPLGPCRGESPPTPPGQPPISPKKFLPSTANRGLPPRTQESRPSDLGKNAGDTLPQEDLPLTKPEMFENPLYGSLSSFPKPAPRKDQESPKMPRKEPPPCPEPGILSPSIVLTKAQEADRGEGPGKQVPAPRLRSFTCSSSAEGRAAGGDKSQGKPKTPVSSQAPVPAKRPIKPSRSEINQQTPPTPTPRPPLPVKSPAVLHLQHSKGRDYRDNTELPHHGKHRPEEGPPGPLGRTAMQ

SEQ ID NO: 131 - protein, 1137 aa, Homo sapiens;
MAGARSRDPWGASGICYLFGSLLVELLFSRAVAFNLDVMGALRKEGEPGSLFGFSVALHRQLQPRPQSWLLVGAPQALALPGQQANRTGGLFACPLSLEETDCYRVDIDQGADMQKESKENQWLGVSVRSQGPGGKIVTCAHRYEARQRVDQILETRDMIGRCFVLSQDLAIRDELDGGEWKFCEGRPQGHEQFGFCQQGTAAAFSPDSHYLLFGAPGTYNWKGLLFVTNIDSSDPDQLVYKTLDPADRLPGPAGDLALNSYLGFSIDSGKGLVRAEELSFVAGAPRANHKGAVVILRKDSASRLVPEVMLSGERLTSGFGYSLAVADLNSDGWPDLIVGAPYFFERQEELGGAVYVYLNQGGHWAGISPLRLCGSPDSMFGISLAVLGDLNQDGFPDIAVGAPFDGDGKVFIYHGSSLGVVAKPSQVLEGEAVGIKSFGYSLSGSLDMDGNQYPDLLVGSLADTAVLFRARPILHVSHEVSIAPRSIDLEQPNCAGGHSVCVDLRVCFSYIAVPSSYSPTVALDYVLDADTDRRLRGQVPRVTFLSRNLEEPKHQASGTVWLKHQHDRVCGDAMFQLQENVKDKLRAIVVTLSYSLQTPRLRRQAPGQGLPPVAPILNAHQPSTQRAEIHFLKQGCGEDKICQSNLQLVRARFCTRVSDTEFQPLPMDVDGTTALFALSGQPVIGLELMVTNLPSDPAQPQADGDDAHEAQLLVMLPDSLHYSGVRALDPAEKPLCLSNENASHVECELGNPMKRGAQVTFYLILSTSGISIETTELEVELLLATISEQELHPVSARARVFIELPLSIAGMAIPQQLFFSGVVRGERAMQSERDVGSKVKYEVTVSNQGQSLRTLGSAFLNIMWPHEIANGKWLLYPMQVELEGGQGPGQKGLCSPRPNILHLDVDSRDRRRRELEPPEQQEPGERQEPSMSWWPVSSAEKKKNITLDCARGTANCVVFSCPLYSFDRAAVLHVWGRLWNSTFLEEYSAVKSLEVIVRANITVKSSIKNLMLRDASTVIPVMVYLDPMAVVAEGVPWWVILLAVLAGLLVLALLVLLLWKMGFFKRAKHPEATVPQYHAVKIPREDRQQFKEEKTGTILRNNWGSPRREGPDAHPILAADGHPELGPDGHPGPGTA

SEQ ID NO: 132 - protein, 1246 aa, Homo sapiens; [sequence omitted]

SEQ ID NO: 133 - protein, 111 aa, Homo sapiens;
MVRTKADSVPGTYRKVVAARAPRKVLGSSTSATNSTSVSSRKAENKYAGGNPVCVRPTPKWQKGIGEFFRLSPKDSEKENQIPEEAGSSGLGKAKRKACPLQPDHTNDEKE

SEQ ID NO: 134 - protein, 1070 aa, Homo sapiens;
MYCCSAQDSKMDYKRRFLLGGSKQKVQQHQQYPMPELGRALSAPLASTATTAPLGSLTAAGSCHHAMPHTTPIADIQQGISKYLDALNVFCRASTFLTDLFSTVFRNSHYSKAATQLKDVQEHVMEAASRLTSAIKPEIAKMLMELSAGAANFTDQKEFSLQDIEVLGRCFLTVVQVHFQFLTHALQKVQPVAHSCFAEVIVPEKKNSGSGGGLSGMGHTPEVEEAVRSWRGAAEATSRLRERGCDGCLAGIEVQQLFCSQSAAIPEHQLKELNIKIDSALQAYKIALESLGHCEYAMKAGFHLNPKAIEASLQGCCSEAEAQQTGRRQTPPQPMQCELPTVPVQIGSHFLKGVSFNESAADNLKLKTHTMLQLMKEAGCYNGITSRDDFPVTEVLNQVCPSTWRGACKTAVQLLFGQAGLVVVDTAQIENKEAYAPQISLEGSRIVVQVPSTWCLKEDPATMSLLQRSLDPEKTLGLVDVLYTAVLDLNRWRAGREQALPCIQIQLQREICDFGNQADLPSGNGNKSSGGLQKTFSKLTSRFTKKASCTSSSSSTNYSIQNTPSKNIFIAGCSEEKAKMPGNIDTRLQSILNIGNFPRTTDPSQSAQNSSNTVANGFLMERRENFLHGDDGKDEKGMNLPTDQEMQEVIDFLSGFNMGQSHQGSPLVTRHNSAATAMVTEQKAGAMQPQQPSLPVPPPPRAPQAGAHTPLTPQPGLAPQQQSPKQQQPQVQYYQHLLQPIGPQQPPPQPRAPGKWVHGSSQQPAQAVGAGLSPLGQWPGISDLSSDLYSLGLVSSYMDNVMSEVLGQKPQGPRNNTWPNRDQSDGVFGMLGEILPFDPAVGSDPEFARYVAGVSQAMQQKRQAQHGRRPGNPRGNWPPMDDAHRTWPFPEFFTEGDGLHGGWSGAQGDSASSSDETSSANGDSLFSMFSGPDLVAAVKQRRKHSSGEQDTSTLPSPPLLTTVEDVNQDNKTKTWPPKAPWQHPSPLPSTLPSPSAPLYAVTSPGSQWNDTMQMLQSPVWAATNDCSAAAFSYVQTPPQPPPPPAHKAAPKGFKAFPGKGERRPAYLPQY

SEQ ID NO: 135 - protein, 614 aa, Homo sapiens; [sequence omitted]

SEQ ID NO: 136 - protein, 179 aa, Homo sapiens;
MAVFKTTLWRLISGTLGIICLSLMSTLGILLKNSFTKLSIEPAFTPGPNIELQKDSDCCSCQEKWVGYRCNCYFISSEQKTWNESRHLCASQKSSLLQLQNTDELDFMSSSQQFYWIGLSYSEEHTAWLWENGSALSQYLFPSFETFNTKNCIAYNPNGNALDESCEDKNRYICKQQLI

SEQ ID NO: 137 - protein, 231 aa, Homo sapiens;
MQDEERYMTLNVQSKKRSSAQTSQLTFKDYSVTLHWYKILLGISGTVNGILTLTLISLILLVSQGVLLKCQKGSCSNATQYEDTGDLKVNNGTRRNISNKDLCASRSADQTVLCQSEWLKYQGKCYWFSNEMKSWSDSYVYCLERKSHLLIIHDQLEMAFIQKNLRQLNYVWIGLNFTSLKMTWTWVDGSPIDSKIFFIKGPAKENSCAAIKESKIFSETCSSVFKWICQY

SEQ ID NO: 138 - protein, 525 aa, Homo sapiens;
MWEAQFLGLLFLQPLWVAPVKPLQPGAEVPVVWAQEGAPAQLPCSPTIPLQDLSLLRRAGVTWQHQPDSGPPAAAPGHPLAPGPHPAAPSSWGPRPRRYTVLSVGPGGLRSGRLPLQPRVQLDERGRQRGDFSLWLRPARRADAGEYRAAVHLRDRALSCRLRLRLGQASMTASPPGSLRASDWVILNCSFSRPDRPASVHWFRNRGQGRVPVRESPHHHLAESFLFLPQVSPMDSGPWGCILTYRDGFNVSIMYNLTVLGLEPPTPLTVYAGAGSRVGLPCRLPAGVGTRSFLTAKWTPPGGGPDLLVTGDNGDFTLRLEDVSQAQAGTYTCHIHLQEQQLNATVTLAIITVTPKSFGSPGSLGKLLCEVTPVSGQERFVWSSLDTPSQRSFSGPWLEAQEAQLLSQPWQCQLYQGERLLGAAVYFTELSSPGAQRSGRAPGALPAGHLLLFLILGVLSLLLLVTGAFGFHLWRRQWRPRRFSALEQGIHPPQAQSKIEELEQEPEPEPEPEPEPEPEPEPEQL

SEQ ID NO: 139 - protein, 131 aa, Homo sapiens;
MAGIKALISLSFGGAIGLMFLMLGCALPIYNKYWPLFVLFFYILSPIPYCIARRLVDDTDAMSNACKELAIFLTTGIVVSAFGLPIVFARAHLIEWGACALVLTGNTVIFATILGFFLVFGSNDDFSWQQW

SEQ ID NO: 140 - protein, 896 aa, Homo sapiens;
MNYVGQLAGQVIVTVKELYKGINQATLSGCIDVIVVQQQDGSYQCSPFHVRFGKLGVLRSKEKVIDIEINGSAVDLHMKLGDNGEAFFVEETEEEYEKLPAYLATSPIPTEDQFFKDIDTPLVKSGGDETPSQSSDISHVLETETIFTPSSVKKKKRRRKKYKQDSKKEEQAASAAAEDTCDVGVSSDDDKGAQAARGSSNASLKEEECKEPLLFHSGDHYPLSDGDWSPLETTYPQTACPKSDSELEVKPAESLLRSESHMEWTWGGFPESTKVSKRERSDHHPRTATITPSENTHFRVIPSEDNLISEVEKDASMEDTVCTIVKPKPRALGTQMSDPTSVAELLEPPLESTQISSMLDADHLPNAALAEAPSESKPAAKVDSPSKKKGVHKRSQHQGPDDIYLDDLKGLEPEVAALYFPKSESEPGSRQWPESDTLSGSQSPQSVGSAAADSGTECLSDSAMDLPDVTLSLCGGLSENGEISKEKFMEHIITYHEFAENPGLIDNPNLVIRIYNRYYNWALAAPMILSLQVFQKSLPKATVESWVKDKMPKKSGRWWFWRKRESMTKQLPESKEGKSEAPPASDLPSSSKEPAGARPAENDSSSDEGSQELEESITVDPIPTEPLSHGSTTSYKKSLRLSSDQIAKLKLHDGPNDVVFSITTQYQGTCRCAGTIYLWNWNDKIIISDIDGTITKSDALGQILPQLGKDWTHQGIAKLYHSINENGYKFLYCSARAIGMADMTRGYLHWVNDKGTILPRGPLMLSPSSLFSAFHREVIEKKPEKFKIECLNDIKNLFAPSKQPFYAAFGNRPNDVYAYTQVGVPDCRIFTVNPKGELIQERTKGNKSSYHRLSELVEHVFPLLSKEQNSAFPCPEFSSFCYWRDPIPEVDLDDLS

SEQ ID NO: 141 - protein, 344 aa, Homo sapiens;
MAAATELNRPSSGDRNLERRCRPNLSREVLYEIFRSLHTLVGQLDLRDDVVKITIDWNKLQSLSAFQPALLFSALEQHILYLQPFLAKLQSPIKEENTTAVEEIGRTEMGNKNEVNDKFSIGDLQEEEKHKESDLRDVKKTQIHFDPEVVQIKAGKAEIDRRISAFIERKQAEINENNVREFCNVIDCNQENSCARTDAIFTPYPGFKSHVKVSRVVNTYGPQTRPEGIPGSGHKPNSMLRDCGNQAVEERLQNIEAHLRLQTGGPVPRDIYQRIKKLEDKILELEGISPEYFQSVSFSGKRRKVQPPQQNYSLAELDEKISALKQALLRKSREAESMATHHLP

SEQ ID NO: 142 - protein, 999 aa, Homo sapiens;
MEPRAAAAGEPEPPAASSSFQARLWKNLQLGVGRSKGGGGGRAGGPERRTADTPSPSPPPPVGTGNAPARGSGAGSRWSGFKKRKQVLDRVFSSSQPNLCCSSPEPLEPGGAGRAEQGSTLRRRIREHLLPAVKGPAAASGAAGGTPPGGRSPDSAPSSSSASSSLSSSPQPPPRGDRARDEGARRQGPGAHLCHQKSSSLPGTACLEQLLEPPPPPAEPARSPAESRAPETGEEHGSSQKIINTAGTSNAEVPLADPGMYQLDITLRRGQSLAARDRGGTSDPYVKFKIGGKEVFRSKIIHKNLNPVWEEKACILVDHLREPLYIKVFDYDFGLQDDFMGSAFLDLTQLELNRPTDVTLTLKDPHYPDHDLGIILLSVILTPKEGESRDVTMLMRKSWKRSSKELSENEVVGSYFSVKSLFWRTCGRPALPVLGFCRAELQNPYCKNVQFQTQSLRLSDLHRKSHLWRGIVSITLIEGRDLKAMDSNGLSDPYVKFRLGHQKYKSKIMPKTLNPQWREQFDFHLYEERGGVIDITAWDKDAGKRDDFIGRCQVDLSALSREQTHKLELQLEEGEGHLVLLVTLTASATVSISDLSVNSLEDQKEREEILKRYSPLRIFHNLKDVGFLQVKVIRAEGLMAADVTGKSDPFCVVELNNDRLLTHTVYKNLNPEWNKVFTFNIKDIHSVLEVTVYDEDRDRSADFLGKVAIPLLSIQNGEQKAYVLKNKQLTGPTKGVIYLEIDVIFNAVKASLRTLIPKEQKYIEEENRLSKQLLLRNFIRMKRCVMVLVNAAYYVNSCFDWDSPPRSLAAFVLFLFVVWNFELYMIPLVLLLLLTWNYFLIISGKDNRQRDTVVEDMLEDEEEEDDKDDKDSEKKGFINKIYAIQEVCVSVQNILDEVASFGERIKNTFNWTVPFLSWLAIVALCVFTAILYCIPLRYIVLVWGINKFTKKLRSPYAIDNNELLDFLSRVPSDVQVVQYQELKPDPSHSPYKRKKNNLG

SEQ ID NO: 143 - protein, 1857 aa, Homo sapiens;
MARKKLKKFTTLEIVLSVLLLVLFIISIVLIVLLAKESLKSTAPDPGTTGTPDPGTTGTPDPGTTGTTHARTTGPPDPGTTGTTPVSAECPVVNELERINCIPDQPPTKATCDQRGCCWNPQGAVSVPWCYYSKNHSYHVEGNLVNTNAGFTARLKNLPSSPVFGSNVDNVLLTAEYQTSNRFHFKLTDQTNNRFEVPHEHVQSFSGNAAASLTYQVEISRQPFSIKVTRRSNNRVLFDSSIGPLLFADQFLQLSTRLPSTNVYGLGEHVHQQYRHDMNWKTWPIFNRDTTPNGNGTNLYGAQTFFLCLEDASGLSFGVFLMNSNAMEVVLQPAPAITYRTIGGILDFYVFLGNTPEQVVQEYLELIGRPALPSYWALGFHLSRYEYGTLDNMREVVERNRAAQLPYDVQHADIDYMDERRDFTYDSVDFKGFPEFVNELHNNGQKLVIIVDPAISNNSSSSKPYGPYDRGSDMKIWVNSSDGVTPLIGEVWPGQTVFPDYTNPNCAVWWTKEFELFHNQVEFDGIWIDMNEVSNFVDGSVSGCSTNNLNNPPFTPRILDGYLFCKTLCMDAVQHWGKQYDIHNLYGYSMAVATAEAAKTVFPNKRSFILTRSTFAGSGKFAAHWLGDNTATWDDLRWSIPGVLEFNLFGIPMVGPDICGFALDTPEELCRRWMQLGAFYPFSRNHNGQGYKDQDPASFGADSLLLNSSRHYLNIRYTLLPYLYTLFFRAHSRGDTVARPLLHEFYEDNSTWDVHQQFLWGPGLLITPVLDEGAEKVMAYVPDAVWYDYETGSQVRWRKQKVEMELPGDKIGLHLRGGYIFPTQQPNTTTLASRKNPLGLIIALDENKEAKGELFWDNGETKDTVANKVYLLCEFSVTQNRLEVNISQSTYKDPNNLAFNEIKILGTEEPSNVTVKHNGVPSQTSPTVTYDSNLKVAIITDIDLLLGEAYTVEWSIKIRDEEKIDCYPDENGASAENCTARGCIWEASNSSGVPFCYFVNDLYSVSDVQYNSHGATADISLKSSVYANAFPSTPVNPLRLDVTYHKNEMLQFKIYDPNKNRYEVPVPLNIPSMPSSTPEGQLYDVLIKKNPFGIEIRRKSTGTIIWDSQLLGFTFSDMFIRISTRLPSKYLYGFGETEHRSYRRDLEWHTWGMFSRDQPPGYKKNSYGVHPYYMGLEEDGSAHGVLLLNSNAMDVTFQPLPALTYRTTGGVLDFYVFLGPTPELVTQQYTELIGRPVMVPYWSLGFQLCRYGYQNDSEIASLYDEMVAAQIPYDVQYSDIDYMERQLDFTLSPKFAGFPALINRMKADGMRVILILDPAISGNETQPYPAFTRGVEDDVFIKYPNDGDIVWGKVWPDFPDVVVNGSLDWDSQVELYRAYVAFPDFFRNSTAKWWKREIEELYNNPQNPERSLKFDGMWIDMNEPSSFVNGAVSPGCRDASLNHPPYMPHLESRDRGLSSKTLCMESQQILPDGSLVQHYNVHNLYGWSQTRPTYEAVQEVTGQRGVVITRSTFPSSGRWAGHWLGDNTAAWDQLKKSIIGMMEFSLFGISYTGADICGFFQDAEYEMCVRWMQLGAFYPFSRNHNTIGTRRQDPVSWDVAFVNISRTVLQTRYTLLPYLYTLMHKAHTEGVTVVRPLLHEFVSDQVTWDIDSQFLLGPAFLVSPVLERNARNVTAYFPRARWYDYYTGVDINARGEWKTLPAPLDHINLHVRGGYILPWQEPALNTHLSRQKFMGFKIALDDEGTAGGWLFWDDGQSIDTYGKGLYYLASFSASQNTMQSHIIFNNYITGTNPLKLGYIEIWGVGSVPVTSVSISVSGMVITPSFNNDPTTQVLSIDVTDRNISLHNFTSLTWISTL

SEQ ID NO: 144 - protein, 750 aa, Homo sapiens;
MGKSESQMDITDINTPKPKKKQRWTPLEISLSVLVLLLTIIAVTMIALYATYDDGICKSSDCIKSAARLIQNMDATTEPCTDFFKYACGGWLKRNVIPETSSRYGNFDILRDELEVVLKDVLQEPKTEDIVAVQKAKALYRSCINESAIDSRGGEPLLKLLPDIYGWPVATENWEQKYGASWTAEKAIAQLNSKYGKKVLINLFVGTDDKNSVNHVIHIDQPRLGLPSRDYYECTGIYKEACTAYVDFMISVARLIRQEERLPIDENQLALEMNKVMELEKEIANATAKPEDRNDPMLLYNKMTLAQIQNNFSLEINGKPFSWLNFTNEIMSTVNISITNEEDVVVYAPEYLTKLKPILTKYSARDLQNLMSWRFIMDLVSSLSRTYKESRNAFRKALYGTTSETATWRRCANYVNGNMENAVGRLYVEAAFAGESKHVVEDLIAQIREVFIQTLDDLTWMDAETKKRAEEKALAIKERIGYPDDIVSNDNKLNNEYLELNYKEDEYFENIIQNLKFSQSKQLKKLREKVDKDEWISGAAVVNAFYSSGRNQIVFPAGILQPPFFSAQQSNSLNYGGIGMVIGHEITHGFDDNGRNFNKDGDLVDWWTQQSASNFKEQSQCMVYQYGNFSWDLAGGQHLNGINTLGENIADNGGLGQAYRAYQNYIKKNGEEKLLPGLDLNHKQLFFLNFAQVWCGTYRPEYAVNSIKTDVHSPGNFRIIGTLQNSAEFSEAFHCRKNSYMNPEKKCRVW

SEQ ID NO: 145 - protein, 2063 aa, Homo sapiens;
MVLDDLPNLEDIYTSLCSSTMEDSEMDFDSGLEDDDTKSDSILEDSTIFVAFKGNIDDKDFKWKLDAILKNVPNLLHMESSKLKVQKVEPWNSVRVTFNIPREAAERLRILAQSNNQQLRDLGILSVQIEGEGAINLALAQNRSQDVRMNGPMGAGNSVRMEAGFPMASGPGIIRMNNPATVMIPPGGNVSSSMMAPGPNPELQPRTPRPASQSDAMDPLLSGLHIQQQSHPSGSLAPPHHPMQPVSVNRQMNPANFPQLQQQQQQQQQQQQQQQQQQQQQQQQQLQARPPQQHQQQQPQGIRPQFTAPTQVPVPPGWNQLPSGALQPPPAQGSLGTMTANQGWKKAPLPGPMQQQLQARPSLATVQTPSHPPPPYPFGSQQASQAHTNFPQMSNPGQFTAPQMKSLQGGPSRVPTPLQQPHLTNKSPASSPSSFQQGSPASSPTVNQTQQQMGPRPPQNNPLPQGFQQPVSSPGRNPMVQQGNVPPNFMVMQQQPPNQGPQSLHPGLGGMPKRLPPGFSAGQANPNFMQGQVPSTTATTPGNSGAPQLQANQNVQHAGGQGAGPPQNQMQVSHGPPNMMQPSLMGIHGNMNNQQAGTSGVPQVNLSNMQGQPQQGPPSQLMGMHQQIVPSQGQMVQQQGTLNPQNPMILSRAQLMPQGQMMVNPPSQNLGPSPQRMTPPKQMLSQQGPQMMAPHNQMMGPQGQVLLQQNPMIEQIMTNQMQGNKQQFNTQNQSNVMPGPAQIMRGPTPNMQGNMVQFTGQMSGQMLPQQGPVNNSPSQVMGIQGQVLRPPGPSPHMAQQHGDPATTANNDVSLSQMMPDVSIQQTNMVPPHVQAMQGNSASGNHFSGHGMSFNAPFSGAPNGNQMSCGQNPGFPVNKDVTLTSPLLVNLLQSDISAGHFGVNNKQNNTNANKPKKKKPPRKKKNSQQDLNTPDTRPAGLEEADQPPLPGEQGINLDNSGPKLPEFSNRPPGYPSQPVEQRPLQQMPPQLMQHVAPPPQPPQQQPQPQLPQQQQPPPPSQPQSQQQQQQQQQMMMMLMMQQDPKSVRLPVSQNVHPPRGPLNPDSQRMPMQQSGSVPVMVSLQGPASVPPSPDKQRMPMPVNTPLGSNSRKMVYQESPQNPSSSPLAEMASLPEASGSEAPSVPGGPNNMPSHVVLPQNQLMMTGPKPGPSPLSATQGATPQQPPVNSLPSSHGHHFPNVAAPTQTSRPKTPNRASPRPYYPQTPNNRPPSTEPSEISLSPERLNASIAGLFPPQINIPLPPRPNLNRGFDQQGLNPTTLKAIGQAPSNLTMNPSNFATPQTHKLDSVVVNSGKQSNSGATKRASPSNSRRSSPGSSRKTTPSPGRQNSKAPKLTLASQTNAALLQNVELPRNVLVSPTPLANPPVPGSFPNNSGLNPQNSTVSVAAVGGVVEDNKESLNVPQDSDCQNSQSRKEQVNIELKAVPAQEVKMVVPEDQSKKDGQPSDPNKLPSVEENKNLVSPAMREAPTSLSQLLDNSGAPNVTIKPPGLTDLEVTPPVVSGEDLKKASVIPTLQDLSSSKEPSNSLNLPHSNELCSSLVHPELSEVSSNVAPSIPPVMSRPVSSSSISTPLPPNQITVFVTSNPITTSANTSAALPTHLQSALMSTVVTMPNAGSKVMVSEGQSAAQSNARPQFITPVFINSSSIIQVMKGSQPSTIPAAPLTTNSGLMPPSVAVVGPLHIPQNIKFSSAPVPPNALSSSPAPNIQTGRPLVLSSRATPVQLPSPPCTSSPVVPSHPPVQQVKELNPDEASPQVNTSADQNTLPSSQSTTMVSPLLTNSPGSSGNRRSPVSSSKGKGKVDKIGQILLTKACKKVTGSLEKGEEQYGADGETEGQGLDTTAPGLMGTEQLSTELDSKTPTPPAPTLLKMTSSPVGPGTASAGPSLPGGALPTSVRSIVTTLVPSELISAVPTTKSNHGGIASESLAGGLVEEKVGSHPELLPSIAPSQNLVSKETSTTALQASVARPELEVNAAIVSGQSSEPKEIVEKSKIPGRRNSRTEEPTVASESVENGHRKRSSRPASASSSTKDITSAVQSKRRKSK

SEQ ID NO: 146 - protein, 428 aa, Homo sapiens;
MYSSPLCLTQDEFHPFIEALLPHVRAFAYTWFNLQARKRKYFKKHEKRMSKDEERAVKDELLGEKPEVKQKWASRLLAKLRKDIRPECREDFVLSITGKKAPGCVLSNPDQKGKMRRIDCLRQADKVWRLDLVMVILFKGIPLESTDGERLVKAAQCGHPVLCVQPHHIGVAVKELDLYLAYFVRERDAEQSGSPRTGMGSDQEDSKPITLDTTDFQESFVTSGVFSVTELIQVSRTPVVTGTGPNFSLGELQGHLAYDLNPASTGLRRTLPSTSSSGSKRHKSGSMEEDVDTSPGGDYYTSPSSPTSSSRNWTEDMEGGISSPVKKTEMDKSPFNSPSPQDSPRLSSFTQHHRPVIAVHSGIARSPHPSSALHFPTTSILPQTASTYFPHTAIRYPPHLNPQDPLKDLVSLACDPASQQPGPSWYLG

SEQ ID NO: 147 - protein, 1429 aa, Homo sapiens;
MAGGAWGRLACYLEFLKKEELKEFQLLLANKAHSRSSSGETPAQPEKTSGMEVASYLVAQYGEQRAWDLALHTWEQMGLRSLCAQAQEGAGHSPSFPYSPSEPHLGSPSQPTSTAVLMPWIHELPAGCTQGSERRVLRQLPDTSGRRWREISASLLYQALPSSPDHESPSQESPNAPTSTAVLGSWGSPPQPSLAPREQEAPGTQWPLDETSGIYYTEIREREREKSEKGRPPWAAVVGTPPQAHTSLQPHHHPWEPSVRESLCSTWPWKNEDFNQKFTQLLLLQRPHPRSQDPLVKRSWPDYVEENRGHLIEIRDLFGPGLDTQEPRIVILQGAAGIGKSTLARQVKEAWGRGQLYGDRFQHVFYFSCRELAQSKVVSLAELIGKDGTATPAPIRQILSRPERLLFILDGVDEPGWVLQEPSSELCLHWSQPQPADALLGSLLGKTILPEASFLITARTTALQNLIPSLEQARWVEVLGFSESSRKEYFYRYFTDERQAIRAFRLVKSNKELWALCLVPWVSWLACTCLMQQMKRKEKLTLTSKTTTTLCLHYLAQALQAQPLGPQLRDLCSLAAEGIWQKKTLFSPDDLRKHGLDGAIISTFLKMGILQEHPIPLSYSFIHLCFQEFFAAMSYVLEDEKGRGKHSNCIIDLEKTLEAYGIHGLFGASTTRFLLGLLSDEGEREMENIFHCRLSQGRNLMQWVPSLQLLLQPHSLESLHCLYETRNKTFLTQVMAHFEEMGMCVETDMELLVCTFCIKFSRHVKKLQLIEGRQHRSTWSPTMVVLFRWVPVTDAYWQILFSVLKVTRNLKELDLSGNSLSHSAVKSLCKTLRRPRCLLETLRLAGCGLTAEDCKDLAFGLRANQTLTELDLSFNVLTDAGAKHLCQRLRQPSCKLQRLQLVSCGLTSDCCQDLASVLSASPSLKELDLQQNNLDDVGVRLLCEGLRHPACKLIRLGLDQTTLSDEMRQELRALEQEKPQLLIFSRRKPSVMTPTEGLDTGEMSNSTSSLKRQRLGSERAASHVAQANLKLLDVSKIFPIAEIAEESSPEVVPVELLCVPSPASQGDLHTKPLGTDDDFWGPTGPVATEVVDKEKNLYRVHFPVAGSYRWPNTGLCFVMREAVTVEIEFCVWDQFLGEINPQHSWMVAGPLLDIKAEPGAVEAVHLPHFVALQGGHVDTSLFQMAHFKEEGMLLEKPARVELHHIVLENPSFSPLGVLLKMIHNALRFIPVTSVVLLYHRVHPEEVTFHLYLIPSDCSIRKELELCYRSPGEDQLFSEFYVGHLGSGIRLQVKDKKDETLVWEALVKPGDLMPATTLIPPARIAVPSPLDAPQLLHFVDQYREQLIARVTSVEVVLDKLHGQVLSQEQYERVLAENTRPSQMRKLFSLSQSWDRKCKDGLYQALKETHPHLIMELWEKGSKKGLLPLSS

SEQ ID NO: 148 - protein, 426 aa, Homo sapiens;
MTPLCLNCSVLPGDLYPGGARNPMACNGSAARGHFDPEDLNLTDEALRLKYLGPQQTELFMPICATYLLIFVVGAVGNGLTCLVILRHKAMRTPTNYYLFSLAVSDLLVLLVGLPLELYEMWHNYPFLLGVGGCYFRTLLFEMVCLASVLNVTALSVERYVAVVHPLQARSMVTRAHVRRVLGAVWGLAMLCSLPNTSLHGIRQLHVPCRGPVPDSAVCMLVRPRALYNMVVQTTALLFFCLPMAIMSVLYLLIGLRLRRERLLLMQEAKGRGSAAARSRYTCRLQQHDRGRRQVTKMLFVLVVVFGICWAPFHADRVMWSVVSQWTDGLHLAFQHVHVISGIFFYLGSAANPVLYSLMSSRFRETFQEALCLGACCHRLRPRHSSHSLSRMTTGSTLCDVGSLGSWVHPLAGNDGPEAQQETDPS

SEQ ID NO: 149 - protein, 357 aa, Homo sapiens;
MQSVQSTSFCLRKQCLCLTFLLLHLLGQVAATQRCPPQCPGRCPATPPTCAPGVRAVLDGCSCCLVCARQRGESCSDLEPCDESSGLYCDRSADPSNQTGICTAVEGDNCVFDGVIYRSGEKFQPSCKFQCTCRDGQIGCVPRCQLDVLLPEPNCPAPRKVEVPGECCEKWICGPDEEDSLGGLTLAAYRPEATLGVEVSDSSVNCIEQTTEWTACSKSCGMGFSTRVTNRNRQCEMLKQTRLCMVRPCEQEPEQPTDKKGKKCLRTKKSLKAIHLQFKNCTSLHTYKPRFCGVCSDGRCCTPHNTKTIQAEFQCSPGQIVKKPVMVIGTCTCHTNCPKNNEAFLQELELKTTRGKM

SEQ ID NO: 150 - protein, 1427 aa, Homo sapiens;
MLLPSDVARLVLGYLQQENLISTCQTFILESSDLKEYAEHCTDEGFIPACLLSLFGKNLTTILNEYVAMKTKETSNNVPAIMSSLWKKLDHTLSQIRSMQSSPRFAGSQRARTRTGIAEIKRQRKLASQTAPASAELLTLPYLSGQFTTPPSTGTQVTRPSGQISDPSRSYFVVVNHSQSQDTVTTGEALNVIPGAQEKKAHASLMSPGRRKSESQRKSTTLSGPHSTIRNFQDPNAFAVEKQMVIENAREKILSNKSLQEKLAENINKFLTSDNNIAQVPKQTDNNPTEPETSIDEFLGLPSEIHMSEEAIQDILEQTESDPAFQALFDLFDYGKTKNNKNISQSISSQPMESNPSIVLADETNLAVKGSFETEESDGQSGQPAFCTSYQNDDPLNALKNSNNHDVLRQEDQENFSQISTSIQKKAFKTAVPTEQKCDIDITFESVPNLNDFNQRGNSNAECNPHCAELYTNQMSTETEMAIGIEKNSLSSNVPSESQLQPDQPDIPITSFVSLGCEANNENLILSGKSSQLLSQDTSLTGKPSKKSQFCENSNDTVKLKINFHGSKSSDSSEVHKSKIEINVLEPVMSQLSNCQDNSCLQSEILPVSVESSHLNVSGQVEIHLGDSLSSTKQPSNDSASVELNHTENEAQASKSENSQEPSSSVKEENTIFLSLGGNANCEKVALTPPEGTPVENSHSLPPESVCSSVGDSHPESQNTDDKPSSNNSAEIDASNIVSLKVIISDDPFVSSDTELTSAVSSINGENLPTIILSSPTKSPTKNAELVKCLSSEETVGAVVYAEVGDSASMEQSLLTFKSEDSAVNNTQNEDGIAFSANVTPCVSKDGGYIQLMPATSTAFGNSNNILIATCVTDPTALGTSVSQSNVVVLPGNSAPMTAQPLPPQLQTPPRSNSVFAVNQAVSPNFSQGSAIIIASPVQPVLQGMVGMIPVSVVGQNGNNFSTPPRQVLHMPLTAPVCNRSIPQFPVPPKSQKAQGLRNKPCIGKQVNNLVDSSGHSVGCHAQKTEVSDKSIATDLGKKSEETTVPFPEESIVPAAKPCHRRVLCFDSTTAPVANTQGPNHKMVSQNKERNAVSFPNLDSPNVSSTLKPPSNNAIKREKEKPPLPKILSKSESAISRHTTIRETQSEKKVSPTEIVLESFHKATANKENELCSDVERQKNPENSKLSIGQQNGGLRSEKSIASLQEMTKKQGTSSNNKNVLSVGTAVKDLKQEQTKSASSLITTEMLQDIQRHSSVSRLADSSDLPVPRTPGSGAGEKHKEEPIDIIKAPSSRRFSEDSSTSKVMVPPVTPDLPACSPASETGSENSVNMAAHTLMILSRAAISRTTSATPLKDNTQQFRASSRSTTKKRKIEELDERERNSRPSSKNLTNSSIPMKKKKIKKKKLPSSFPAGMDVDKFLLSLHYDE

SEQ ID NO: 151 - protein, 1288 aa, Homo sapiens;
MGSPEGRFHFAIDRGGTFTDVFAQCPGGHVRVLKLLSEDPANYADAPTEGIRRILEQEAGMLLPRDQPLDSSHIASIRMGTTVATNALLERKGERVALLVTRGFRDLLHIGTQARGDLFDLAVPMPEVLYEEVLEVDERVVLHRGEAGTGTPVKGRTGDLLEVQQPVDLGALRGKLEGLLSRGIRSLAVVLMHSYTWAQHEQQVGVLARELGFTHVSLSSEAMPMVRIVPRGHTACADAYLTPAIQRYVQGFCRGFQGQLKDVQVLFMRSDGGLAPMDTFSGSSAVLSGPAGGVVGYSATTYQQEGGQPVIGFDMGGTSTDVSRYAGEFEHVFEASTAGVTLQAPQLDINTVAAGGGSRLFFRSGLFVVGPESAGAHPGPACYRKGGPVTVTDANLVLGRLLPASFPCIFGPGENQPLSPEASRKALEAVATEVNSFLTNGPCPASPLSLEEVAMGFVRVANEAMCRPIRALTQARGHDPSAHVLACFGGAGGQHACAIARALGMDTVHIHRHSGLLSALGLALADVVHEAQEPCSLLYAPETFVQLDQRLSRLEEQCVDALQAQGFPRSQISTESFLHLRYQGTDCALMVSAHQHPATARSPRAGDFGAAFVERYMREFGFVIPERPVVVDDVRVRGTGRSGLRLEDAPKAQTGPPRVDKMTQCYFEGGYQETPVYLLAELGYGHKLHGPCLIIDSNSTILVEPGCQAEVTKTGDICISVGAEVPGTVGPQLDPIQLSIFSHRFMSIAEQMGRILQRTAISTNIKERLDFSCALFGPDGGLVSNAPHIPVHLGAMQETVQFQIQHLGADLHPGDVLLSNHPSAGGSHLPDLTVITPVFWPGQTRPVFYVASRGHHADIGGITPGSMPPHSTMLQQEGAVFLSFKLVQGGVFQEEAVTEALRAPGKVPNCSGTRNLHDNLSDLRAQVAANQKGIQLVGELIGQYGLDVVQAYMGHIQANAELAVRDMLRAFGTSRQARGLPLEVSSEDHMDDGSPIRLRVQISLSQGSAVFDFSGTGPEVFGNLNAPRAVTLSALIYCLRCLVGRDIPLNQGCLAPVRVVIPRGSILDPSPEAAVVGGNVLTSQRVVDVILGAFGACAASQGCMNNVTLGNAHMGYYETVAGGAGAGPSWHGRSGVHSHMTNTRITDPEILESRYPVILRRFELRRGSGGRGRFRGGDGVTRELLFREEALLSVLTERRAFRPYGLHGGEPGARGLNLLIRKNGRTVNLGGKTSVTVYPGDVFCLHTPGGGGYGDPEDPAPPPGSPPQALAFPEHGSVYEYRRAQEAV

SEQ ID NO: 152 - protein, 854 aa, Homo sapiens;
MGMCSRQERIQKDIDVVIQKSRAEKDCLFADFRYSDSTFTFTYVGGPRSVSYSVHVSEDYPDNTYVSSSENDEDVLVTTEPIPVIFHRIATELRKTNDINCCLSIKSKLQKENGEESRQNSTVEEDSEGDNDSEEFYYGGQVNYDGELHKHPQLEADLSAVREIYGPHAVSLREYGAIDDVDIDLHIDVSFLDEEIAVAWEVIRTEPIIVRLHCSLTQYLNGPVPTVDVFQISTKERFGLGHQLKKIMQTFVTQQWKQSKEKSNCLHNKKLSEKKVKSPLHLFSTLRRSPSYPPPGCGKSKSKLKSEQDGISKTHKLLRRTCSSTVKTDDVCVTKSHRTFGRSLSSDPRAEQAMTAIKSHKLLNRPCPAAVKSEECLTLKSHRLLTRSCSGDPRCEHNTNLKPHKLLSRSYSSNLRMEELYGLKNHKLLSKSYSSAPKSSKTELFKEPNAEGRRLSLTSGLIGILTPSSSSSSQLAPNGAKCIPVRDRGFLVQTIEFAEQRIPVLNEYCVVCDEPHVFQNGPMLRPTVCERELCVFAFQTLGVMNEAADEIATGAQVVDLLVSMCRSALESPRKVVIFEPYPSVVDPNDPQMLAFNPRKKNYDRVMKALDSITSIREMTQAPYLEIKKQMDKQDPLAHPLLQWVISSNRSHIVKLPVNRQLKFMHTPHQFLLLSSPPAKESNFRAAKKLFGSTFAFHGSHIENWHSILRNGLVVASNTRLQLHGAMYGSGIYLSPMSSISFGYSGMNKKQKVSAKDEPASSSKSSNTSQSQKKGQQSQFLQSRNLKCIALCEVITSSDLHKHGEIWVVPNTDHVCTRFFFVYEDGQVGDANINTQEGGIHKEILRVIGNQTATG

SEQ ID NO: 153 - protein, 415 aa, Homo sapiens;
MRGANAWAPLCLLLAAATQLSRQQSPERPVFTCGGILTGESGFIGSEGFPGVYPPNSKCTWKITVPEGKVVVLNFRFIDLESDNLCRYDFVDVYNGHANGQRIGRFCGTFRPGALVSSGNKMMVQMISDANTAGNGFMAMFSAAEPNERGDQYCGGLLDRPSGSFKTPNWPDRDYPAGVTCVWHIVAPKNQLIELKFEKFDVERDNYCRYDYVAVFNGGEVNDARRIGKYCGDSPPAPIVSERNELLIQFLSDLSLTADGFIGHYIFRPKKLPTTTEQPVTTTFPVTTGLKPTVALCQQKCRRTGTLEGNYCSSDFVLAGTVITTITRDGSLHATVSIINIYKEGNLAIQQAGKNMSARLTVVCKQCPLLRRGLNYIIMGQVGEDGRGKIMPNSFIMMFKTKNQKLLDALKNKQC

SEQ ID NO: 154 - protein, 345 aa, Homo sapiens;
MSLFGLLLLTSALAGQRQGTQAESNLSSKFQFSSNKEQNGVQDPQHERIITVSTNGSIHSPRFPHTYPRNTVLVWRLVAVEENVWIQLTFDERFGLEDPEDDICKYDFVEVEEPSDGTILGRWCGSGTVPGKQISKGNQIRIRFVSDEYFPSEPGFCIHYNIVMPQFTEAVSPSVLPPSALPLDLLNNAITAFSTLEDLIRYLEPERWQLDLEDLYRPTWQLLGKAFVFGRKSRVVDLNLLTEEVRLYSCTPRNFSVSIREELKRTDTIFWPGCLLVKRCGGNCACCLHNCNECQCVPSKVTKKYHEVLQLRPKTGVRGLHKSLTDVALEHHEECDCVCRGSTGG

SEQ ID NO: 155 - protein, 1447 aa, Homo sapiens;
MAHSKTRTNDGKITYPPGVKEISDKISKEEMVRRLKMVVKTFMDMDQDSEEEKELYLNLALHLASDFFLKHPDKDVRLLVACCLADIFRIYAPEAPYTSPDKLKDIFMFITRQLKGLEDTKSPQFNRYFYLLENIAWVKSYNICFELEDSNEIFTQLYRTLFSVINNGHNQKVHMHMVDLMSSIICEGDTVSQELLDTVLVNLVPAHKNLNKQAYDLAKALLKRTAQAIEPYITNFFNQVLMLGKTSISDLSEHVFDLILELYNIDSHLLLSVLPQLEFKLKSNDNEERLQVVKLLAKMFGAKDSELASQNKPLWQCYLGRFNDIHVPIRLECVKFASHCLMNHPDLAKDLTEYLKVRSHDPEEAIRHDVIVSIVTAAKKDILLVNDHLLNFVRERTLDKRWRVRKEAMMGLAQIYKKYALQSAAGKDAAKQIAWIKDKLLHIYYQNSIDDRLLVERIFAQYMVPHNLETTERMKCLYYLYATLDLNAVKALNEMWKCQNLLRHQVKDLLDLIKQPKTDASVKAIFSKVMVITRNLPDPGKAQDFMKKFTQVLEDDEKIRKQLEVLVSPTCSCKQAEGCVREITKKLGNPKQPTNPFLEMIKFLLERIAPVHIDTESISALIKQVNKSIDGTADDEDEGVPTDQAIRAGLELLKVLSFTHPISFHSAETFESLLACLKMDDEKVAEAALQIFKNTGSKIEEDFPHIRSALLPVLHHKSKKGPPRQAKYAIHCIHAIFSSKETQFAQIFEPLHKSLDPSNLEHLITPLVTIGHIALLAPDQFAAPLKSLVATFIVKDLLMNDRLPGKKTTKLWVPDEEVSPETMVKIQAIKMMVRWLLGMKNNHSKSGTSTLRLLTTILHSDGDLTEQGKISKPDMSRLRLAAGSAIVKLAQEPCYHEIITLEQYQLCALAINDECYQVRQVFAQKLHKGLSRLRLPLEYMAICALCAKDPVKERRAHARQCLVKNINVRREYLKQHAAVSEKLLSLLPEYVVPYTIHLLAHDPDYVKVQDIEQLKDVKECLWFVLEILMAKNENNSHAFIRKMVENIKQTKDAQGPDDAKMNEKLYTVCDVAMNIIMSKSTTYSLESPKDPVLPARFFTQPDKNFSNTKNYLPPEMKSFFTPGKPKTTNVLGAVNKPLSSAGKQSQTKSSRMETVSNASSSSNPSSPGRIKGRLDSSEMDHSENEDYTMSSPLPGKKSDKRDDSDLVRSELEKPRGRKKTPVTEQEEKLGMDDLTKLVQEQKPKGSQRSRKRGHTASESDEQQWPEEKRLKEDILENEDEQNSPPKKGKRGRPPKPLGGGTPKEEPTMKTSKKGSKKKSGPPAPEEEEEEERQSGNTEQKSKSKQHRVSRRAQQRAESPESSAIESTQSTPQKGRGRPSKTPSPSQPKKNVRVGRSKQAATKENDSSEEVDVFQGSSPVDDIPQEETEEEEVSTVNVRRRSAKRERR

SEQ ID NO: 156 - protein, 2039 aa, Homo sapiens;
MDIVDTFNHLIPTEHLDDALFLGSNLENEVCEDFSASQNVLEDSLKNMLSDKDPMLGSASNQFCLPVLDSNDPNFQMPCSTVVGLDDIMDEGVVKESGNDTIDEEELILPNRNLRDKVEENSVRSPRKSPRLMAQEQVRSLRQSTIAKRSNAAPLSNTKKASGKTVSTAKAGVKQPERSQVKEEVCMSLKPEYHKENRRCSRNSGQIEVVPEVSVSSSHSSVSSCLEMKDEDGLDSKHKCNNPGEIDVPSHELNCSLLSETCVTIGEKKNEALMECKAKPVGSPLFKFSDKEEHEQNDSISGKTGETVVEEMIATRKVEQDSKETVKLSHEDDHILEDAGSSDISSDAACTNPNKTENSLVGLPSCVDEVTECNLELKDTMGIADKTENTLERNKIEPLGYCEDAESNRQLESTEFNKSNLEVVDTSTFGPESNILENAICDVPDQNSKQLNAIESTKIESHETANLQDDRNSQSSSVSYLESKSVKSKHTKPVIHSKQNMTTDAPKKIVAAKYEVIHSKTKVNVKSVKRNTDVPESQQNFHRPVKVRKKQIDKEPKIQSCNSGVKSVKNQAHSVLKKTLQDQTLVQIFKPLTHSLSDKSHAHPGCLKEPHHPAQTGHVSHSSQKQCHKPQQQAPAMKTNSHVKEELEHPGVEHFKEEDKLKLKKPEKNLQPRQRRSSKSFSLDEPPLFIPDNIATIRREGSDHSSSFESKYMWTPSKQCGFCKKPHGNRFMVGCGRCDDWFHGDCVGLSLSQAQQMGEEDKEYVCVKCCAEEDKKTEILDPDTLENQATVEFHSGDKTMECEKLGLSKHTTNDRTKYIDDTVKHKVKILKRESGEGRNSSDCRDNEIKKWQLAPLRKMGQPVLPRRSSEEKSEKIPKESTTVTCTGEKASKPGTHEKQEMKKKKVEKGVLNVHPAASASKPSADQIRQSVRHSLKDILMKRLTDSNLKVPEEKAAKVATKIEKELFSFFRDTDAKYKNKYRSLMFNLKDPKNNILFKKVLKGEVTPDHLIRMSPEELASKELAAWRRRENRHTIEMIEKEQREVERRPITKITHKGEIEIESDAPMKEQEAAMEIQEPAANKSLEKPEGSEKQKEEVDSMSKDTTSQHRQHLFDLNCKICIGRMAPPVDDLSPKKVKVVVGVARKHSDNEAESIADALSSTSNILASEFFEEEKQESPKSTFSPAPRPEMPGTVEVESTFLARLNFIWKGFINMPSVAKFVTKAYPVSGSPEYLTEDLPDSIQVGGRISPQTVWDYVEKIKASGTKEICVVRFTPVTEEDQISYTLLFAYFSSRKRYGVAANNMKQVKDMYLIPLGATDKIPHPLVPFDGPGLELHRPNLLLGLIIRQKLKRQHSACASTSHIAETPESAPPIALPPDKKSKIEVSTEEAPEEENDFFNSFTTVLHKQRNKPQQNLQEDLPTAVEPLMEVTKQEPPKPLRFLPGVLIGWENQPTTLELANKPLPVDDILQSLLGTTGQVYDQAQSVMEQNTVKEIPFLNEQTNSKIEKTDNVEVTDGENKEIKVKVDNISESTDKSAEIETSVVGSSSISAGSLTSLSLRGKPPDVSTEAFLTNLSIQSKQEETVESKEKTLKRQLQEDQENNLQDNQTSNSSPCRSNVGKGNIDGNVSCSENLVANTARSPQFINLKRDPRQAAGRSQPVTTSESKDGDSCRNGEKHMLPGLSHNKEHLTEQINVEEKLCSAEKNSCVQQSDNLKVAQNSPSVENIQTSQAEQAKPLQEDILMQNIETVHPFRRGSAVATSHFEVGNTCPSEFPSKSITFTSRSTSPRTSTNFSPMRPQQPNLQHLKSSPPGFPFPGPPNFPPQSMFGFPPHLPPPLLPPPGFGFAQNPMVPWPPVVHLPGQPQRMMGPLSQASRYIGPQNFYQVKDIRRPERRHSDPWGRQDQQQLDRPFNRGKGDRQRFYSDSHHLKRERHEKEWEQESERHRRRDRSQDKDRDRKSREEGHKDKERARLSHGDRGTDGKASRDSRNVDKKPDKPKSEDYEKDKEREKSKHREGEKDRDRYHKDRDHTDRTKSKR

SEQ ID NO: 157 - protein, 1686 aa, Homo sapiens;
MAQISSNSGFKECPSSHPEPTRAKDVDKEEALQMEAEALAKLQKDRQVTDNQRGFELSSSTRKKAQVYNKQDYDLMVFPESDSQKRALDIDVEKLTQAELEKLLLDDSFETKKTPVLPVTPILSPSFSAQLYFRPTIQRGQWPPGLPGPSTYALPSIYPSTYSKQAAFQNGFNPRMPTFPSTEPIYLSLPGQSPYFSYPLTPATPFHPQGSLPIYRPVVSTDMAKLFDKIASTSEFLKNGKARTDLEITDSKVSNLQVSPKSEDISKFDWLDLDPLSKPKVDNVEVLDHEEEKNVSSLLAKDPWDAVLLEERSTANCHLERKVNGKSLSVATVTRSQSLNIRTTQLAKAQGHISQKDPNGTSSLPTGSSLLQEVEVQNEEMAAFCRSITKLKTKFPYTNHRTNPGYLLSPVTAQRNICGENASVKVSIDIEGFQLPVTFTCDVSSTVEIIIMQALCWVHDDLNQVDVGSYVLKVCGQEEVLQNNHCLGSHEHIQNCRKWDTEIRLQLLTFSAMCQNLARTAEDDETPVDLNKHLYQIEKPCKEAMTRHPVEELLDSYHNQVELALQIENQHRAVDQVIKAVRKICSALDGVETLAITESVKKLKRAVNLPRSKTADVTSLFGGEDTSRSSTRGSLNPENPVQVSINQLTAAIYDLLRLHANSGRSPTDCAQSSKSVKEAWTTTEQLQFTIFAAHGISSNWVSNYEKYYLICSLSHNGKDLFKPIQSKKVGTYKNFFYLIKWDELIIFPIQISQLPLESVLHLTLFGILNQSSGSSPDSNKQRKGPEALGKVSLPLFDFKRFLTCGTKLLYLWTSSHTNSVPGTVTKKGYVMERIVLQVDFPSPAFDIIYTTPQVDRSIIQQHNLETLENDIKGKLLDILHKDSSLGLSKEDKAFLWEKRYYCFKHPNCLPKILASAPNWKWVNLAKTYSLLHQWPALYPLIALELLDSKFADQEVRSLAVTWIEAISDDELTDLLPQFVQALKYEIYLNSSLVQFLLSRALGNIQIAHNLYWLLKDALHDVQFSTRYEHVLGALLSVGGKRLREELLKQTKLVQLLGGVAEKVRQASGSARQVVLQRSMERVQSFFQKNKCRLPLKPSLVAKELNIKSCSFFSSNAVPLKVTMVNADPMGEEINVMFKVGEDLRQDMLALQMIKIMDKIWLKEGLDLRMVIFKCLSTGRDRGMVELVPASDTLRKIQVEYGVTGSFKDKPLAEWLRKYNPSEEEYEKASENFIYSCAGCCVATYVLGICDRHNDNIMLRSTGHMFHIDFGKFLGHAQMFGSFKRDRAPFVLTSDMAYVINGGEKPTIRFQLFVDLCCQAYNLIRKQTNLFLNLLSLMIPSGLPELTSIQDLKYVRDALQPQTTDAEATIFFTRLIESSLGSIATKFNFFIHNLAQLRFSGLPSNDEPILSFSPKTYSFRQDGRIKEVSVFTYHKKYNPDKHYIYVVRILREGQIEPSFVFRTFDEFQELHNKLSIIFPLWKLPGFPNRMVLGRTHIKDVAAKRKIELNSYLQSLMNASTDVAECDLVCTFFHPLLRDEKAEGIARSADAGSFSPTPGQIGGAVKLSISYRNGTLFIMVMHIKDLVTEDGADPNPYVKTYLLPDNHKTSKRKTKISRKTRNPTFNEMLVYSGYSKETLRQRELQLSVLSAESLRENFFLGGVTLPLKDFNLSKETVKWYQLTAATYL

SEQ ID NO: 158 - protein, 441 aa, Homo sapiens;
MVPPKLHVLFCLCGCLAVVYPFDWQYINPVAHMKSSAWVNKIQVLMAAASFGQTKIPRGNGPYSVGCTDLMFDHTNKGTFLRLYYPSQDNDRLDTLWIPNKEYFWGLSKFLGTHWLMGNILRLLFGSMTTPANWNSPLRPGEKYPLVVFSHGLGAFRTLYSAIGIDLASHGFIVAAVEHRDRSASATYYFKDQSAAEIGDKSWLYLRTLKQEEETHIRNEQVRQRAKECSQALSLILDIDHGKPVKNALDLKFDMEQLKDSIDREKIAVIGHSFGGATVIQTLSEDQRFRCGIALDAWMFPLGDEVYSRIPQPLFFINSEYFQYPANIIKMKKCYSPDKERKMITIRGSVHQNFADFTFATGKIIGHMLKLKGDIDSNVAIDLSNKASLAFLQKHLGLHKDFDQWDCLIEGDDENLIPGTNINTTNQHIMLQNSSGIEKYN

SEQ ID NO: 159 - protein, 1410 aa, Homo sapiens;
MADTDLFMECEEEELEPWQKISDVIEDSVVEDYNSVDKTTTVSVSQQPVSAPVPIAAHASVAGHLSTSTTVSSSGAQNSDSTKKTLVTLIANNNAGNPLVQQGGQPLILTQNPAPGLGTMVTQPVLRPVQVMQNANHVTSSPVASQPIFITTQGFPVRNVRPVQNAMNQVGIVLNVQQGQTVRPITLVPAPGTQFVKPTVGVPQVFSQMTPVRPGSTMPVRPTTNTFTTVIPATLTIRSTVPQSQSQQTKSTPSTSTTPTATQPTSLGQLAVQSPGQSNQTTNPKLAPSFPSPPAVSIASFVTVKRPGVTGENSNEVAKLVNTLNTIPSLGQSPGPVVVSNNSSAHGSQRTSGPESSMKVTSSIPVFDLQDGGRKICPRCNAQFRVTEALRGHMCYCCPEMVEYQKKGKSLDSEPSVPSAAKPPSPEKTAPVASTPSSTPIPALSPPTKVPEPNENVGDAVQTKLIMLVDDFYYGRDGGKVAQLTNFPKVATSFRCPHCTKRLKNNIRFMNHMKHHVELDQQNGEVDGHTICQHCYRQFSTPFQLQCHLENVHSPYESTTKCKICEWAFESEPLFLQHMKDTHKPGEMPYVCQVCQYRSSLYSEVDVHFRMIHEDTRHLLCPYCLKVFKNGNAFQQHYMRHQKRNVYHCNKCRLQFLFAKDKIEHKLQHHKTFRKPKQLEGLKPGTKVTIRASRGQPRTVPVSSNDTPPSALQEAAPLTSSMDPLPVFLYPPVQRSIQKRAVRKMSVMGRQTCLECSFEIPDFPNHFPTYVHCSLCRYSTCCSRAYANHMINNHVPRKSPKYLALFKNSVSGIKLACTSCTFVTSVGDAMAKHLVFNPSHRSSSILPRGLTWIAHSRHGQTRDRVHDRNVKNMYPPPSFPTNKAATVKSAGATPAEPEELLTPLAPALPSPASTATPPPTPTHPQALALPPLATEGAECLNVDDQDEGSPVTQEPELASGGGGSGGVGKKEQLSVKKLRVVLFALCCNTEQAAEHFRNPQRRIRRWLRRFQASQGENLEGKYLSFEAEEKLAEWVLTQREQQLPVNEETLFQKATKIGRSLEGGFKISYEWAVRFMLRHHLTPHARRAVAHTLPKDVAENAGLFIDFVQRQIHNQDLPLSMIVAIDEISLFLDTEVLSSDDRKENALQTVGTGEPWCDVVLAILADGTVLPTLVFYRGQMDQPANMPDSILLEAKESGYSDDEIMELWSTRVWQKHTACQRSKGMLVMDCHRTHLSEEVLAMLSASSTLPAVVPAGCSSKIQPLDVCIKRTVKNFLHKKWKEQAREMADTACDSDVLLQLVLVWLGEVLGVIGDCPELVQRSFLVASVLPGPDGNINSPTRNADMQEELIASLEEQLKLSGEHSESSTPRPRSSPEETIEPESLHQLFEGESETESFYGFEEADLDLMEI

SEQ ID NO: 160 - protein, 878 aa, Homo sapiens;
MATAPSYPAGLPGSPGPGSPPPPGGLELQSPPPLLPQIPAPGSGVSFHIQIGLTREFVLLPAASELAHVKQLACSIVDQKFPECGFYGLYDKILLFKHDPTSANLLQLVRSSGDIQEGDLVEVVLSASATFEDFQIRPHALTVHSYRAPAFCDHCGEMLFGLVRQGLKCDGCGLNYHKRCAFSIPNNCSGARKRRLSSTSLASGHSVRLGTSESLPCTAEELSRSTTELLPRRPPSSSSSSSASSYTGRPIELDKMLLSKVKVPHTFLIHSYTRPTVCQACKKLLKGLFRQGLQCKDCKFNCHKRCATRVPNDCLGEALINGDVPMEEATDFSEADKSALMDESEDSGVIPGSHSENALHASEEEEGEGGKAQSSLGYIPLMRVVQSVRHTTRKSSTTLREGWVVHYSNKDTLRKRHYWRLDCKCITLFQNNTTNRYYKEIPLSEILTVESAQNFSLVPPGTNPHCFEIVTANATYFVGEMPGGTPGGPSGQGAEAARGWETAIRQALMPVILQDAPSAPGHAPHRQASLSISVSNSQIQENVDIATVYQIFPDEVLGSGQFGVVYGGKHRKTGRDVAVKVIDKLRFPTKQESQLRNEVAILQSLRHPGIVNLECMFETPEKVFVVMEKLHGDMLEMILSSEKGRLPERLTKFLITQILVALRHLHFKNIVHCDLKPENVLLASADPFPQVKLCDFGFARIIGEKSFRRSVVGTPAYLAPEVLLNQGYNRSLDMWSVGVIMYVSLSGTFPFNEDEDINDQIQNAAFMYPASPWSHISAGAIDLINNLLQVKMRKRYSVDKSLSHPWLQEYQTWLDLRELEGKMGERYITHESDDARWEQFAAEHPLPGSGLPTDRDLGGACPPQDHDMQGLAERISVL

SEQ ID NO: 161 - protein, 4128 aa, Homo sapiens; [sequence omitted]

SEQ ID NO: 162 - protein, 546 aa, Homo sapiens;
MANNSPALTGNSQPQHQAAAAAAQQQQQCGGGGATKPAVSGKQGNVLPLWGNEKTMNLNPMILTNILSSPYFKVQLYELKTYHEVVDEIYFKVTHVEPWEKGSRKTAGQTGMCGGVRGVGTGGIVSTAFCLLYKLFTLKLTRKQVMGLITHTDSPYIRALGFMYIRYTQPPTDLWDWFESFLDDEEDLDVKAGGGCVMTIGEMLRSFLTKLEWFSTLFPRIPVPVQKNIDQQIKTRPRKIKKDGKEGAEEIDRHVERRRSRSPRRSLSPRRSPRRSRSRSHHREGHGSSSFDRELEREKERQRLEREAKEREKERRRSRSIDRGLERRRSRSRERHRSRSRSRDRKGDRRDRDREREKENERGRRRDRDYDKERGNEREKERERSRERSKEQRSRGEVEEKKHKEDKDDRRHRDDKRDSKKEKKHSRSRSRERKHRSRSRSRNAGKRSRSRSKEKSSKHKNESKEKSNKRSRSGSQGRTDSVEKSKKREHSPSKEKSRKRSRSKERSHKRDHSDSKDQSDKHDRRRSQSIEQESQEKQHKNKDETV

SEQ ID NO: 163 - protein, 383 aa, Homo sapiens;
MAGIPGLLFLLFFLLCAVGQVSPYSAPWKPTWPAYRLPVVLPQSTLNLAKPDFGAEAKLEVSSSCGPQCHKGTPLPTYEEAKQYLSYETLYANGSRTETQVGIYILSSSGDGAQHRDSGSSGKSRRKRQIYGYDSRFSIFGKDFLLNYPFSTSVKLSTGCTGTLVAEKHVLTAAHCIHDGKTYVKGTQKLRVGFLKPKFKDGGRGANDSTSAMPEQMKFQWIRVKRTHVPKGWIKGNANDIGMDYDYALLELKKPHKRKFMKIGVSPPAKQLPGGRIHFSGYDNDRPGNLVYRFCDVKDETYDLLYQQCDAQPGASGSGVYVRMWKRQQQKWERKIIGIFSGHQWVDMNGSPQDFNVAVRITPLKYAQICYWIKGNYLDCREG

SEQ ID NO: 164 - protein, 492 aa, Homo sapiens;
MANNYKKIVLLKGLEVINDYHFRIVKSLLSNDLKLNPKMKEEYDKIQIADLMEEKFPGDAGLGKLIEFFKEIPTLGDLAETLKREKLKVANKIESIPVKGIIPSKKTKQKEVYPATPACTPSNRLTAKGAEETLGPQKRKKPSEEETGTKRSKMSKEQTRPSCSAGASTSTAMGRSPPPQTSSSAPPNTSSTESLKPLANRHATASKNIFREDPIIAMVLNATKVFKYESSENEQRRMFHATVATQTQFFHVKVLNINLKRKFIKKRIIIISNYSKRNSLLEVNEASSVSEAGPDQTFEVPKDIIRRAKKIPKINILHKQTSGYIVYGLFMLHTKIVNRKTTIYEIQDKTGSMAVVGKGECHNIPCEKGDKLRLFCFRLRKRENMSKLMSEMHSFIQIQKNTNQRSHDSRSMALPQEQSQHPKPSEASTTLPESHLKTPQMPPTTPSSSSFTKKDETHPGAQSSPANFRITSPTVAPPLSSDTSTNRHPAVP

SEQ ID NO: 165 - protein, 776 aa, Homo sapiens;
MNNSLENTISFEEYIRVKARSVPQHRMKEFLDSLASKGPEALQEFQQTATTTMVYQQGGNCIYTDSTEVAGSLLELACPVTTSVQPQTQQEQQIQVQQPQQVQVQVQVQQSPQQVSAQLSPQLTVHQPTEQPIQVQVQIQGQAPQSAAPSIQTPSLQSPSPSQLQAAQIQVQHVQAAQQIQAAEIPEEHIPHQQIQAQLVAGQSLAGGQQIQIQTVGALSPPPSQQGSPREGERRVGTASVLQPVKKRKVDMPITVSYAISGQPVATVLAIPQGQQQSYVSLRPDLLTVDSAHLYSATGTITSPTGETWTIPVYSAQPRGDPQQQSITHIAIPQEAYNAVHVSGSPTALAAVKLEDDKEKMVGTTSVVKNSHEEVVQTLANSLFPAQFMNGNIHIPVAVQAVAGTYQNTAQTVHIWDPQQQPQQQTPQEQTPPPQQQQQQLQVTCSAQTVQVAEVEPQSQPQPSPELLLPNSLKPEEGLEVWKNWAQTKNAELEKDAQNRLAPIGRRQLLRFQEDLISSAVAELNYGLCLMTREARNGEGEPYDPDVLYYIFLCIQKYLFENGRVDDIFSDLYYVRFTEWLHEVLKDVQPRVTPLGYVLPSHVTEEMLWECKQLGAHSPSTLLTTLMFFNTKYFLLKTVDQHMKLAFSKVLRQTKKNPSNPKDKSTSIRYLKALGIHQTGQKVTDDMYAEQTENPENPLRCPIKLYDFYLFKCPQSVKGRNDTFYLTPEPVVAPNSPIWYSVQPISREQMGQMLTRILVIREIQEAIAVANASTMH

SEQ ID NO: 166 - protein, 225 aa, Homo sapiens;
MAGGGAGDPGLGAAAAPAPETREHLFKVLVIGELGVGKTSIIKRYVHQLFSQHYRATIGVDFALKVLNWDSRTLVRLQLWDIAGQERFGNMTRVYYKEAVGAFVVFDISRSSTFEAVLKWKSDLDSKVHLPNGSPIPAVLLANKCDQNKDSSQSPSQVDQFCKEHGFAGWFETSAKDNINIEEAARFLVEKILVNHQSFPNEENDVDKIKLDQETLRAENKSQCC

SEQ ID NO: 167 - protein, 977 aa, Homo sapiens;
MRTAGRDPVPRRSPRWRRAVPLCETSAGRRVTQLRGDDLRRPATMKGKERSPVKAKRSRGGEDSTSRGERSKKLGGSGGSNGSSSGKTDSGGGSRRSLHLDKSSSRGGSREYDTGGGSSSSRLHSYSSPSTKNSSGGGESRSSSRGGGGESRSSGAASSAPGGGDGAEYKTLKISELGSQLSDEAVEDGLFHEFKRFGDVSVKISHLSGSGSGDERVAFVNFRRPEDARAAKHARGRLVLYDRPLKIEAVYVSRRRSRSPLDKDTYPPSASVVGASVGGHRHPPGGGGGQRSLSPGGAALGYRDYRLQQLALGRLPPPPPPPLPRDLERERDYPFYERVRPAYSLEPRVGAGAGAAPFREVDEISPEDDQRANRTLFLGNLDITVTESDLRRAFDRFGVITEVDIKRPSRGQTSTYGFLKFENLDMSHRAKLAMSGKIIIRNPIKIGYGKATPTTRLWVGGLGPWVPLAALAREFDRFGTIRTIDYRKGDSWAYIQYESLDAAHAAWTHMRGFPLGGPDRRLRVDFADTEHRYQQQYLQPLPLTHYELVTDAFGHRAPDPLRGARDRTPPLLYRDRDRDLYPDSDWVPPPPPVRERSTRTAATSVPAYEPLDSLDRRRDGWSLDRDRGDRDLPSSRDQPRKRRLPEESGGRHLDRSPESDRPRKRHCAPSPDRSPELSSSRDRYNSDNDRSSRLLLERPSPIRDRRGSLEKSQGDKRDRKNSASAERDRKHRTTAPTEGKSPLKKEDRSDGSAPSTSTASSKLKSPSQKQDGGTAPVASASPKLCLAWQGMLLLKNSNFPSNMHLLQGDLQVASSLLVEGSTGGKVAQLKITQRLRLDQPKLDEVTRRIKVAGPNGYAILLAVPGSSDSRSSSSSAASDTATSTQRPLRNLVSYLKQKQAAGVISLPVGGNKDKENTGVLHAFPPCEFSQQFLDSPAKALAKSEEDYLVMIIVRGFGFQIGVRYENKKRENLALTLL

SEQ ID NO: 168 - protein, 423 aa, Homo sapiens;
MASDDFDIVIEAMLEAPYKKEEDEQQRKEVKKDYPSNTTSSTSNSGNETSGSSTIGETSNRSRDRDRYRRRNSRSRSPGRQCRHRSRSWDRRHGSESRSRDHRREDRVHYRSPPLATGYRYGHSKSPHFREKSPVREPVDNLSPEERDARTVFCMQLAARIRPRDLEDFFSAVGKVRDVRIISDRNSRRSKGIAYVEFCEIQSVPLAIGLTGQRLLGVPIIVQASQAEKNRLAAMANNLQKGNGGPMRLYVGSLHFNITEDMLRGIFEPFGKIDNIVLMKDSDTGRSKGYGFITFSDSECARRALEQLNGFELAGRPMRVGHVTERLDGGTDITFPDGDQELDLGSAGGRFQLMAKLAEGAGIQLPSTAAAAAAAAAQAAALQLNGAVPLGALNPAALTALSPALNLASQCFQLSSLFTPQTM

SEQ ID NO: 169 - protein, 1147 aa, Homo sapiens;
MDIRKFFGVIPSGKKLVSETVKKNEKTKSDEETLKAKKGIKEIKVNSSRKEDDFKQKQPSKKKRIIYDSDSESEETLQVKNAKKPPEKLPVSSKPGKISRQDPVTYISETDEEDDFMCKKAASKSKENGRSTNSHLGTSNMKKNEENTKTKNKPLSPIKLTPTSVLDYFGTGSVQRSNKKMVASKRKELSQNTDESGLNDEAIAKQLQLDEDAELERQLHEDEEFARTLAMLDEEPKTKKARKDTEAGETFSSVQANLSKAEKHKYPHKVKTAQVSDERKSYSPRKQSKYESSKESQQHSKSSADKIGEVSSPKASSKLAIMKRKEESSYKEIEPVASKRKENAIKLKGETKTPKKTKSSPAKKESVSPEDSEKKRTNYQAYRSYLNREGPKALGSKEIPKGAENCLEGLIFVITGVLESIERDEAKSLIERYGGKVTGNVSKKTNYLVMGRDSGQSKSDKAAALGTKIIDEDGLLNLIRTMPGKKSKYEIAVETEMKKESKLERTPQKNVQGKRKISPSKKESESKKSRPTSKRDSLAKTIKKETDVFWKSLDFKEQVAEETSGDSKARNLADDSSENKVENLLWVDKYKPTSLKTIIGQQGDQSCANKLLRWLRNWQKSSSEDKKHAKFGKFSGKDDGSSFKAALLSGPPGVGKTTTASLVCQELGYSYVELNASDTRSKSSLKAIVAESLNNTSIKGFYSNGAASSVSTKHALIMDEVDGMAGNEDRGGIQELIGLIKHTKIPIICMCNDRNHPKIRSLVHYCFDLRFQRPRVEQIKGAMMSIAFKEGLKIPPPAMNEIILGANQDIRQVLHNLSMWCARSKALTYDQAKADSHRAKKDIKMGPFDVARKVFAAGEETAHMSLVDKSDLFFHDYSIAPLFVQENYIHVKPVAAGGDMKKHLMLLSRAADSICDGDLVDSQIRSKQNWSLLPAQAIYASVLPGELMRGYMTQFPTFPSWLGKHSSTGKHDRIVQDLALHMSLRTYSSKRTVNMDYLSLLRDALVQPLTSQGVDGVQDVVALMDTYYLMKEDFENIMEISSWGGKPSPFSKLDPKVKAAFTRAYNKEAHLTPYSLQAIKASRHSTSPSLDSEYNEELNEDDSQSDEKDQDAIETDAMIKKKTKSSKPSKPEKDKEPRKGKGKSSKK

SEQ ID NO: 170 - protein, 150 aa, Homo sapiens;
MVLCFPLLLLLLVLWGPVCPLHAWPKRLTKAHWFEIQHIQPSPLQCNRAMSGINNYTQHCKHQNTFLHDSFQNVAAVCDLLSIVCKNRRHNCHQSSKPVNMTDCRLTSGKYPQCRYSAAAQYKFFIVACDPPQKSDPPYKLVPVHLDSIL

SEQ ID NO: 171 - protein, 499 aa, Homo sapiens;
MASNSLFSTVTPCQQNFFWDPSTSRRFSPPSSSLQPGKMSDVSPVVAAQQQQQQQQQQQQQQQQQQQQQQQEAAAAAAAAAAAAAAAAAVPRLRPPHDNRTMVEIIADHPAELVRTDSPNFLCSVLPSHWRCNKTLPVAFKVVALGEVPDGTVVTVMAGNDENYSAELRNASAVMKNQVARFNDLRFVGRSGRGKSFTLTITVFTNPPQVATYHRAIKVTVDGPREPRRHRQKLDDSKPSLFSDRLSDLGRIPHPSMRVGVPPQNPRPSLNSAPSPFNPQGQSQITDPRQAQSSPPWSYDQSYPSYLSQMTSPSIHSTTPLSSTRGTGLPAITDVPRRISGASELGPFSDPRQFPSISSLTESRFSNPRMHYPATFTYTPPVTSGMSLGMSATTHYHTYLPPPYPGSSQSQSGPFQTSSTPYLYYGTSSGSYQFPMVPGGDRSPSRMLPPCTTTSNGSTLLNPNLPNQNDGVDADGSHSSSPTVLNSSGRMDESVWRPY

SEQ ID NO: 172 - protein, 607 aa, Homo sapiens;
MRGAARLGRPGRSCLPGARGLRAPPPPPLLLLLALLPLLPAPGAAAAPAPRPPELQSASAGPSVSLYLSEDEVRRLIGLDAELYYVRNDLISHYALSFSLLVPSETNFLHFTWHAKSKVEYKLGFQVDNVLAMDMPQVNISVQGEVPRTLSVFRVELSCTGKVDSEVMILMQLNLTVNSSKNFTVLNFKRRKMCYKKLEEVKTSALDKNTSRTIYDPVHAAPTTSTRVFYISVGVCCAVIFLVAIILAVLHLHSMKRIELDDSISASSSSQGLSQPSTQTTQYLRADTPNNATPITSYPTLRIEKNDLRSVTLLEAKGKVKDIAISRERITLKDVLQEGTFGRIFHGILIDEKDPNKEKQAFVKTVKDQASEIQVTMMLTESCKLRGLHHRNLLPITHVCIEEGEKPMVILPYMNWGNLKLFLRQCKLVEANNPQAISQQDLVHMAIQIACGMSYLARREVIHKDLAARNCVIDDTLQVKITDNALSRDLFPMDYHCLGDNENRPVRWMALESLVNNEFSSASDVWAFGVTLWELMTLGQTPYVDIDPFEMAAYLKDGYRIAQPINCPDELFAVMACCWALDPEERPKFQQLVQCLTEFHAALGAYV

SEQ ID NO: 173 - protein, 1048 aa, Homo sapiens;
MGPPRHPQAGEIEAGGAGGGRRLQVEMSSQQFPRLGAPSTGLSQAPSQIANSGSAGLINPAATVNDESGRDSEVSAREHMSSSSSLQSREEKQEPVVVRPYPQVQMLSTHHAVASATPVAVTAPPAHLTPAVPLSFSEGLMKPPPKPTMPSRPIAPAPPSTLSLPPKVPGQVTVTMESSIPQASAIPVATISGQQGHPSNLHHIMTTNVQMSIIRSNAPGPPLHIGASHLPRGAAAAAVMSSSKVTTVLRPTSQLPNAATAQPAVQHIIHQPIQSRPPVTTSNAIPPAVVATVSATRAQSPVITTTAAHATDSALSRPTLSIQHPPSAAISIQRPAQSRDVTTRITLPSHPALGTPKQQLHTMAQKTIFSTGTPVAAATVAPILATNTIPSATTAGSVSHTQAPTSTIVTMTVPSHSSHATAVTTSNIPVAKVVPQQITHTSPRIQPDYPAERSSLIPISGHRASPNPVAMETRSDNRPSVPVQFQYFLPTYPPSAYPLAAHTYTPITSSVSTIRQYPVSAQAPNSAITAQTGVGVASTVHLNPMQLMTVDASHARHIQGIQPAPISTQGIQPAPIGTPGIQPAPLGTQGIHSATPINTQGLQPAPMGTQQPQPEGKTSAVVLADGATIVANPISNPFSAAPAATTVVQTHSQSASTNAPAQGSSPRPSILRKKPATDGAKPKSEIHVSMATPVTVSMETVSNQNNDQPTIAVPPTAQQPPPTIPTMIAAASPPSQPAVALSTIPGAVPITPPITTIAAAPPPSVTVGGSLSSVLGPPVPEIKVKEEVEPMDIMRPVSAVPPLATNTVSPSLALLANNLSMPTSDLPPGASPRKKPRKQQHVISTEEGDMMETNSTDDEKSTAKSLLVKAEKRKSPPKEYIDEEGVRYVPVRPRPPITLLRHYRNPWKAAYHHFQRYSDVRVKEEKKAMLQEIANQKGVSCRAQGWKVHLCAAQLLQLTNLEHDVYERLTNLQEGIIPKKKAATDDDLHRINELIQGNMQRCKLVMDQISEARDSMLKVLDHKDRVLKLLNKNGTVKKVSKLKRKEKV

SEQ ID NO: 174 - protein, 862 aa, Homo sapiens;
MRMCTPIRGLLMALAVMFGTAMAFAPIPRITWEHREVHLVQFHEPDIYNYSALLLSEDKDTLYIGAREAVFAVNALNISEKQHEVYWKVSEDKKAKCAEKGKSKQTECLNYIRVLQPLSATSLYVCGTNAFQPACDHLNLTSFKFLGKNEDGKGRCPFDPAHSYTSVMVDGELYSGTSYNFLGSEPIISRNSSHSPLRTEYAIPWLNEPSFVFADVIRKSPDSPDGEDDRVYFFFTEVSVEYEFVFRVLIPRIARVCKGDQGGLRTLQKKWTSFLKARLICSRPDSGLVFNVLRDVFVLRSPGLKVPVFYALFTPQLNNVGLSAVCAYNLSTAEEVFSHGKYMQSTTVEQSHTKWVRYNGPVPKPRPGACIDSEARAANYTSSLNLPDKTLQFVKDHPLMDDSVTPIDNRPRLIKKDVNYTQIVVDRTQALDGTVYDVMFVSTDRGALHKAISLEHAVHIIEETQLFQDFEPVQTLLLSSKKGNRFVYAGSNSGVVQAPLAFCGKHGTCEDCVLARDPYCAWSPPTATCVALHQTESPSRGLIQEMSGDASVCPDKSKGSYRQHFFKHGGTAELKCSQKSNLARVFWKFQNGVLKAESPKYGLMGRKNLLIFNLSEGDSGVYQCLSEERVKNKTVFQVVAKHVLEVKVVPKPVVAPTLSVVQTEGSRIATKVLVASTQGSSPPTPAVQATSSGAITLPPKPAPTGTSCEPKIVINTVPQLHSEKTMYLKSSDNRLLMSLFLFFFVLFLCLFFYNCYKGYLPRQCLKFRSALLIGKKKPKSDFCDREQSLKETLVEPGSFSQQNGEHPKPALDTGYETEQDTITSKVPTDREDSQRIDDLSARDKPFDVKCELKFADSDADGD

SEQ ID NO: 175 - protein, 827 aa, Homo sapiens;
MRGCLRLALLCALPWLLLAASPGHPAKSPRQPPAPRRDPFDAARGADFDHVYSGVVNLSTENIYSFNYTSQPDQVTAVRVYVNSSSENLNYPVLVVVRQQKEVLSWQVPLLFQGLYQRSYNYQEVSRTLCPSEATNETGPLQQLIFVDVASMAPLGAQYKLLVTKLKHFQLRTNVAFHFTASPSQPQYFLYKFPKDVDSVIIKVVSEMAYPCSVVSVQNIMCPVYDLDHNVEFNGVYQSMTKKAAITLQKKDFPGEQFFVVFVIKPEDYACGGSFFIQEKENQTWNLQRKKNLEVTIVPSIKESVYVKSSLFSVFIFLSFYLGCLLVGFVHYLRFQRKSIDGSFGSNDGSGNMVASHPIAASTPEGSNYGTIDESSSSPGRQMSSSDGGPPGQSDTDSSVEESDFDTMPDIESDKNIIRTKMFLYLSDLSRKDRRIVSKKYKIYFWNIITIAVFYALPVIQLVITYQTVVNVTGNQDICYYNFLCAHPLGVLSAFNNILSNLGHVLLGFLFLLIVLRRDILHRRALEAKDIFAVEYGIPKHFGLFYAMGIALMMEGVLSACYHVCPNYSNFQFDTSFMYMIAGLCMLKLYQTRHPDINASAYSAYASFAVVIMVTVLGVVFGKNDVWFWVIFSAIHVLASLALSTQIYYMGRFKIDLGIFRRAAMVFYTDCIQQCSRPLYMDRMVLLVVGNLVNWSFALFGLIYRPRDFASYMLGIFICNLLLYLAFYIIMKLRSSEKVLPVPLFCIVATAVMWAAALYFFFQNLSSWEGTPAESREKNRECILLDFFDDHDIWHFLSATALFFSFLVLLTLDDDLDVVRRDQIPVF

SEQ ID NO: 176 - protein, 453 aa, Homo sapiens;
MALVRALVCCLLTAWHCRSGLGLPVAPAGGRNPPPAIGQFWHVTDLHLDPTYHITDDHTKVCASSKGANASNPGPFGDVLCDSPYQLILSAFDFIKNSGQEASFMIWTGDSPPHVPVPELSTDTVINVITNMTTTIQSLFPNLQVFPALGNHDYWPQDQLPVVTSKVYNAVANLWKPWLDEEAISTLRKGGFYSQKVTTNPNLRIISLNTNLYYGPNIMTLNKTDPANQFEWLESTLNNSQQNKEKVYIIAHVPVGYLPSSQNITAMREYYNEKLIDIFQKYSDVIAGQFYGHTHRDSIMVLSDKKGSPVNSLFVAPAVTPVKSVLEKQTNNPGIRLFQYDPRDYKLLDMLQYYLNLTEANLKGESIWKLEYILTQTYDIEDLQPESLYGLAKQFTILDSKQFIKYYNYFFVSYDSSVTCDKTCKAFQICAIMNLDNISYADCLKQLYIKHNY

SEQ ID NO: 177 - protein, 262 aa, Homo sapiens;
MKTPFGKTPGQRSRADAGHAGVSANMMKKRTSHKKHRSSVGPSKPVSQPRRNIVGCRIQHGWKEGNGPVTQWKGTVLDQVPVNPSLYLIKYDGFDCVYGLELNKDERVSALEVLPDRVATSRISDAHLADTMIGKAVEHMFETEDGSKDEWRGMVLARAPVMNTWFYITYEKDPVLYMYQLLDDYKEGDLRIMPDSNDSPPAEREPGEVVDSLVGKQVEYAKEDGSKRTGMVIHQVEAKPSVYFIKFDDDFHIYVYDLVKTS

SEQ ID NO: 178 - protein, 350 aa, Homo sapiens;
MKCSLRVWFLSVAFLLVFIMSLLFTYSHHSMATLPYLDSGALDGTHRVKLVPGYAGLQRLSKERLSGKSCACRRCMGDAGASDWFDSHFDGNISPVWTRENMDLPPDVQRWWMMLQPQFKSHNTNEVLEKLFQIVPGENPYRFRDPHQCRRCAVVGNSGNLRGSGYGQDVDGHNFIMRMNQAPTVGFEQDVGSRTTHHFMYPESAKNLPANVSFVLVPFKVLDLLWIASALSTGQIRFTYAPVKSFLRVDKEKVQIYNPAFFKYIHDRWTEHHGRYPSTGMLVLFFALHVCDEVNVYGFGADSRGNWHHYWENNRYAGEFRKTGVHDADFEAHIIDMLAKASKIEVYRGN

SEQ ID NO: 179 - protein, 910 aa, Homo sapiens;
MIDLSFLTEEEQEAIMKVLQRDAALKRAEEERVRHLPEKIKDDQQLKNMSGQWFYEAKAKRHRDKIHGADIIRASMRKKRPQIAAEQSKDRENGAKESWVNNVNKDAFLPPELAGVVEEPEEDAAPASPSSSVVNPASSVIDMSQENTRKPNVSPEKRKNPFNSSKLPEGHSSQQTKNEQSKNGRTGLFQTSKEDELSESKEKSTVADTSIQKLEKSKQTLPGLSNGSQIKAPIPKARKMIYKSTDLNKDDNQSFPRQRTDSLKARGAPRGILKRNSSSSSTDSETLRYNHNFEPKSKIVSPGLTIHERISEKEHSLEDNSSPNSLEPLKHVRFSAVKDELPQSPGLIHGREVGEFSVLESDRLKNGMEDAGDTEEFQSDPKPSQYRKPSLFHQSTSSPYVSKSETHQPMTSGSFPINGLHSHSEVLTARPQSMENSPTINEPKDKSSELTRLESVLPRSPADELSHCVEPEPSQVPGGSSRDRQQGSEEEPSPVLKTLERSAARKMPSKSLEDISSDSSNQAKVDNQPEELVRSAEDDEKPDQKPVTNECVPRISTVPTQPDNPFSHPDKLKRMSKSVPAFLQDEVSGSVMSVYSGDFGNLEVKGNIQFAIEYVESLKELHVFVAQCKDLAAADVKKQRSDPYVKAYLLPDKGKMGKKKTLVVKKTLNPVYNEILRYKIEKQILKTQKLNLSIWHRDTFKRNSFLGEVELDLETWDWDNKQNKQLRWYPLKRKTAPVALEAENRGEMKLALQYVPEPVPGKKLPTTGEVHIWVKECLDLPLLRGSHLNSFVKCTILPDTSRKSRQKTRAVGKTTNPIFNHTMVYDGFRPEDLMEACVELTVWDHYKLTNQFLGGLRIGFGTGKSYGTEVDWMDSTSEEVALWEKMVNSPNTWIEATLPLRMLLIAKISK

SEQ ID NO: 180 - protein, 851 aa, Homo sapiens;
MTSHYVIAIFALMSSCLATAGPEPGALCELSPVSASHPVQALMESFTVLSGCASRGTTGLPQEVHVLNLRTAGQGPGQLQREVTLHLNPISSVHIHHKSVVFLLNSPHPLVWHLKTERLATGVSRLFLVSEGSVVQFSSANFSLTAETEERNFPHGNEHLLNWARKEYGAVTSFTELKIARNIYIKVGEDQVFPPKCNIGKNFLSLNYLAEYLQPKAAEGCVMSSQPQNEEVHIIELITPNSNPYSAFQVDITIDIRPSQEDLEVVKNLILILKCKKSVNWVIKSFDVKGSLKIIAPNSIGFGKESERSMTMTKSIRDDIPSTQGNLVKWALDNGYSPITSYTMAPVANRFHLRLENNAEEMGDEEVHTIPPELRILLDPGALPALQNPPIRGGEGQNGGLPFPFPDISRRVWNEEGEDGLPRPKDPVIPSIQLFPGLREPEEVQGSVDIALSVKCDNEKMIVAVEKDSFQASGYSGMDVTLLDPTCKAKMNGTHFVLESPLNGCGTRPRWSALDGVVYYNSIVIQVPALGDSSGWPDGYEDLESGDNGFPGDMDEGDASLFTRPEIVVFNCSLQQVRNPSSFQEQPHGNITFNMELYNTDLFLVPSQGVFSVPENGHVYVEVSVTKAEQELGFAIQTCFISPYSNPDRMSHYTIIENICPKDESVKFYSPKRVHFPIPQADMDKKRFSFVFKPVFNTSLLFLQCELTLCTKMEKHPQKLPKCVPPDEACTSLDASIIWAMMQNKKTFTKPLAVIHHEAESKEKGPSMKEPNPISPPIFHGLDTLTVMGIAFAAFVIGALLTGALWYIYSHTGETAGRQQVPTSPPASENSSAAHSIGSTQSTPCSSSSTA

SEQ ID NO: 181 - protein, 772 aa, Homo sapiens;
MYPQGRHPAPHQPGQPGFKFTVAESCDRIKDEFQFLQAQYHSLKVEYDKLANEKTEMQRHYVMYYEMSYGLNIEMHKQTEIAKRLNTILAQIMPFLSQEHQQQVAQAVERAKQVTMTELNAIIGQQQLQAQHLSHATHGPPVQLPPHPSGLQPPGIPPVTGSSSGLLALGALGSQAHLTVKDEKNHHELDHRERESSANNSVSPSESLRASEKHRGSADYSMEAKKRKAEEKDSLSRYDSDGDKSDDLVVDVSNEDPATPRVSPAHSPPENGLDKARSLKKDAPTSPASVASSSSTPSSKTKDLGHNDKSSTPGLKSNTPTPRNDAPTPGTSTTPGLRSMPGKPPGMDPIGIMASALRTPISITSSYAAPFAMMSHHEMNGSLTSPGAYAGLHNIPPQMSAAAAAAAAAYGRSPMVSFGAVGFDPHPPMRATGLPSSLASIPGGKPAYSFHVSADGQMQPVPFPHDALAGPGIPRHARQINTLSHGEVVCAVTISNPTRHVYTGGKGCVKIWDISQPGSKSPISQLDCLNRDNYIRSCKLLPDGRTLIVGGEASTLTIWDLASPTPRIKAELTSSAPACYALAISPDAKVCFSCCSDGNIAVWDLHNQTLVRQFQGHTDGASCIDISHDGTKLWTGGLDNTVRSWDLREGRQLQQHDFTSQIFSLGYCPTGEWLAVGMESSNVEVLHHTKPDKYQLHLHESCVLSLKFAYCGKWFVSTGKDNLLNAWRTPYGASIFQSKESSSVLSCDISADDKYIVTGSGDKKATVYEVIY

SEQ ID NO: 182 - protein, 858 aa, Homo sapiens;
MGDHLDLLLGVVLMAGPVFGIPSCSFDGRIAFYRFCNLTQVPQVLNTTERLLLSFNYIRTVTASSFPFLEQLQLLELGSQYTPLTIDKEAFRNLPNLRILDLGSSKIYFLHPDAFQGLFHLFELRLYFCGLSDAVLKDGYFRNLKALTRLDLSKNQIRSLYLHPSFGKLNSLKSIDFSSNQIFLVCEHELEPLQGKTLSFFSLAANSLYSRVSVDWGKCMNPFRNMVLEILDVSGNGWTVDITGNFSNAISKSQAFSLILAHHIMGAGFGFHNIKDPDQNTFAGLARSSVRHLDLSHGFVFSLNSRVFETLKDLKVLNLAYNKINKIADEAFYGLDNLQVLNLSYNLLGELYSSNFYGLPKVAYIDLQKNHIAIIQDQTFKFLEKLQTLDLRDNALTTIHFIPSIPDIFLSGNKLVTLPKINLTANLIHLSENRLENLDILYFLLRVPHLQILILNQNRFSSCSGDQTPSENPSLEQLFLGENMLQLAWETELCWDVFEGLSHLQVLYLNHNYLNSLPPGVFSHLTALRGLSLNSNRLTVLSHNDLPANLEILDISRNQLLAPNPDVFVSLSVLDITHNKFICECELSTFINWLNHTNVTIAGPPADIYCVYPDSFSGVSLFSLSTEGCDEEEVLKSLKFSLFIVCTVTLTLFLMTILTVTKFRGFCFICYKTAQRLVFKDHPQGTEPDMYKYDAYLCFSSKDFTWVQNALLKHLDTQYSDQNRFNLCFEERDFVPGENRIANIQDAIWNSRKIVCLVSRHFLRDGWCLEAFSYAQGRCLSDLNSALIMVVVGSLSQYQLMKHQSIRGFVQKQQYLRWPEDLQDVGWFLHKLSQQILKKEKEKKKDNNIPLQTVATIS

SEQ ID NO: 183 - protein, 324 aa, Homo sapiens;
MAAAAPGNGRASAPRLLLLFLVPLLWAPAAVRAGPDEDLSHRNKEPPAPAQQLQPQPVAVQGPEPARVEKIFTPAAPVHTNKEDPATQTNLGFIHAFVAAISVIIVSELGDKTFFIAAIMAMRYNRLTVLAGAMLALGLMTCLSVLFGYATTVIPRVYTYYVSTVLFAIFGIRMLREGLKMSPDEGQEELEEVQAELKKKDEEFQRTKLLNGPGDVETGTSITVPQKKWLHFISPIFVQALTLTFLAEWGDRSQLTTIVLAAREDPYGVAVGGTVGHCLCTGLAVIGGRMIAQKISVRTVTIIGGIVFLAFAFSALFISPDSGF

SEQ ID NO: 184 - protein, 169 aa, Homo sapiens;
MAPPWVPAMGFTLAPSLGCFVGSRFVHGEGLRWYAGLQKPSWHPPHWVLGPVWGTLYSAMGYGSYLVWKELGGFTEKAVVPLGLYTGQLALNWAWPPIFFGARQMGWALVDLLLVSGAAAATTVAWYQVSPLAARLLYPYLAWLAFTTTLNYCVWRDNHGWRGGRRLPE

SEQ ID NO: 185 - protein, 3433 aa, Homo sapiens;
MAKYGEHEASPDNGQNEFSDIIKSRSDEHNDVQKKTFTKWINARFSKSGKPPINDMFTDLKDGRKLLDLLEGLTGTSLPKERGSTRVHALNNVNRVLQVLHQNNVELVNIGGTDIVDGNHKLTLGLLWSIILHWQVKDVMKDVMSDLQQTNSEKILLSWVRQTTRPYSQVNVLNFTTSWTDGLAFNAVLHRHKPDLFSWDKVVKMSPIERLEHAFSKAQTYLGIEKLLDPEDVAVQLPDKKSIIMYLTSLFEVLPQQVTIDAIREVETLPRKYKKECEEEAINIQSTAPEEEHESPRAETPSTVTEVDMDLDSYQIALEEVLTWLLSAEDTFQEQDDISDDVEEVKDQFATHEAFMMELTAHQSSVGSVLQAGNQLITQGTLSDEEEFEIQEQMTLLNARWEALRVESMDRQSRLHDVLMELQKKQLQQLSAWLTLTEERIQKMETCPLDDDVKSLQKLLEEHKSLQSDLEAEQVKVNSLTHMVVIVDENSGESATAILEDQLQKLGERWTAVCRWTEERWNRLQEINILWQELLEEQCLLKAWLTEKEEALNKVQTSNFKDQKELSVSVRRLAILKEDMEMKRQTLDQLSEIGQDVGQLLDNSKASKKINSDSEELTQRWDSLVQRLEDSSNQVTQAVAKLGMSQIPQKDLLETVRVREQAITKKSKQELPPPPPPKKRQIHVDIEAKKKFDAISAELLNWILKWKTAIQTTEIKEYMKMQDTSEMKKKLKALEKEQRERIPRADELNQTGQILVEQMGKEGLPTEEIKNVLEKVSSEWKNVSQHLEDLERKIQLQEDINAYFKQLDELEKVIKTKEEWVKHTSISESSRQSLPSLKDSCQRELTNLLGLHPKIEMARASCSALMSQPSAPDFVQRGFDSFLGRYQAVQEAVEDRQQHLENELKGQPGHAYLETLKTLKDVLNDSENKAQVSLNVLNDLAKVEKALQEKKTLDEILENQKPALHKLAEETKALEKNVHPDVEKLYKQEFDDVQGKWNKLKVLVSKDLHLLEEIALTLRAFEADSTVIEKWMDGVKDFLMKQQAAQGDDAGLQRQLDQCSAFVNEIETIESSLKNMKEIETNLRSGPVAGIKTWVQTRLGDYQTQLEKLSKEIATQKSRLSESQEKAANLKKDLAEMQEWMTQAEEEYLERDFEYKSPEELESAVEEMKRAKEDVLQKEVRVKILKDNIKLLAAKVPSGGQELTSELNVVLENYQLLCNRIRGKCHTLEEVWSCWIELLHYLDLETTWLNTLEERMKSTEVLPEKTDAVNEALESLESVLRHPADNRTQIRELGQTLIDGGILDDIISEKLEAFNSRYEDLSHLAESKQISLEKQLQVLRETDQMLQVLQESLGELDKQLTTYLTDRIDAFQVPQEAQKIQAEISAHELTLEELRRNMRSQPLTSPESRTARGGSQMDVLQRKLREVSTKFQLFQKPANFEQRMLDCKRVLDGVKAELHVLDVKDVDPDVIQTHLDKCMKLYKTLSEVKLEVETVIKTGRHIVQKQQTDNPKGMDEQLTSLKVLYNDLGAQVTEGKQDLERASQLARKMKKEAASLSEWLSATETELVQKSTSEGLLGDLDTEISWAKNVLKDLEKRKADLNTITESSAALQNLIEGSEPILEERLCVLNAGWSRVRTWTEDWCNTLMNHQNQLEIFDGNVAHISTWLYQAEALLDEIEKKPTSKQEEIVKRLVSELDDANLQVENVRDQALILMNARGSSSRELVEPKLAELNRNFEKVSQHIKSAKLLIAQEPLYQCLVTTETFETGVPFSDLEKLENDIENMLKFVEKHLESSDEDEKMDEESAQIEEVLQRGEEMLHQPMEDNKKEKIRLQLLLLHTRYNKIKAIPIQQRKMGQLASGIRSSLLPTDYLVEINKILLCMDDVELSLNVPELNTAIYEDFSFQEDSLKNIKDQLDKLGEQIAVIHEKQPDVILEASGPEAIQIRDTLTQLNAKWDRINRMYSDRKGCFDRAMEEWRQFHCDLNDLTQWITEAEELLVDTCAPGGSLDLEKARIHQQELEVGISSHQPSFAALNRTGDGIVQKLSQADGSFLKEKLAGLNQRWDAIVAEVKDRQPRLKGESKQVMKYRHQLDEIICWLTKAEHAMQKRSTTELGENLQELRDLTQEMEVHAEKLKWLNRTELEMLSDKSLSLPERDKISESLRTVNMTWNKICREVPTTLKECIQEPSSVSQTRIAAHPNVQKVVLVSSASDIPVQSHRTSEISIPADLDKTITELADWLVLIDQMLKSNIVTVGDVEEINKTVSRMKITKADLEQRHPQLDYVFTLAQNLKNKASSSDMRTAITEKLERVKNQWDGTQHGVELRQQQLEDMIIDSLQWDDHREETEELMRKYEARLYILQQARRDPLTKQISDNQILLQELGPGDGIVMAFDNVLQKLLEEYGSDDTRNVKETTEYLKTSWINLKQSIADRQNALEAEWRTVQASRRDLENFLKWIQEAETTVNVLVDASHRENALQDSILARELKQQMQDIQAEIDAHNDIFKSIDGNRQKMVKALGNSEEATMLQHRLDDMNQRWNDLKAKSASIRAHLEASAEKWNRLLMSLEELIKWLNMKDEELKKQMPIGGDVPALQLQYDHCKALRRELKEKEYSVLNAVDQARVFLADQPIEAPEEPRRNLQSKTELTPEERAQKIAKAMRKQSSEVKEKWESLNAVTSNWQKQVDKALEKLRDLQGAMDDLDADMKEAESVRNGWKPVGDLLIDSLQDHIEKIMAFREEIAPINFKVKTVNDLSSQLSPLDLHPSLKMSRQLDDLNMRWKLLQVSVDDRLKQLQEAHRDFGPSSQHFLSTSVQLPWQRSISHNKVPYYINHQTQTTCWDHPKMTELFQSLADLNNVRFSAYRTAIKIRRLQKALCLDLLELSTTNEIFKQHKLNQNDQLLSVPDVINCLTTTYDGLEQMHKDLVNVPLCVDMCLNWLLNVYDTGRTGKIRVQSLKIGLMSLSKGLLEEKYRYLFKEVAGPTEMCDQRQLGLLLHDAIQIPRQLGEVAAFGGSNIEPSVRSCFQQNNNKPEISVKEFIDWMHLEPQSMVWLPVLHRVAAAETAKHQAKCNICKECPIVGFRYRSLKHFNYDVCQSCFFSGRTAKGHKLHYPMVEYCIPTTSGEDVRDFTKVLKNKFRSKKYFAKHPRLGYLPVQTVLEGDNLETPITLISMWPEHYDPSQSPQLFHDDTHSRIEQYATRLAQMERTNGSFLTDSSSTTGSVEDEHALIQQYCQTLGGESPVSQPQSPAQILKSVEREERGELERIIADLEEEQRNLQVEYEQLKDQHLRRGLPVGSPPESIISPHHTSEDSELIAEAKLLRQHKGRLEARMQILEDHNKQLESQLHRLRQLLEQPESDSRINGVSPWASPQHSALSYSLDPDASGPQFHQAAGEDLLAPPHDTSTDLTEVMEQIHSTFPSCCPNVPSRPQAM

SEQ ID NO: 186 - protein, 119 aa, Homo sapiens;
MVKMTKSKTFQAYLPNCHRTYSCIHCRAHLANHDELISKSFQGSQGRAYLFNSVVNVGCGPAEERVLLTGLHAVADIYCENCKTTLGWKYEHAFESSQKYKEGKFIIELAHMIKDNGWE

SEQ ID NO: 187 - protein, 494 aa, Homo sapiens;
MSTTLLSAFYDVDFLCKTEKSLANLNLNNMLDKKAVGTPVAAAPSSGFAPGFLRRHSASNLHALAHPAPSPGSCSPKFPGAANGSSCGSAAAGGPTSYGTLKEPSGGGGTALLNKENKFRDRSFSENGDRSQHLLHLQQQQKGGGGSQINSTRYKTELCRPFEESGTCKYGEKCQFAHGFHELRSLTRHPKYKTELCRTFHTIGFCPYGPRCHFIHNADERRPAPSGGASGDLRAFGTRDALHLGFPREPRPKLHHSLSFSGFPSGHHQPPGGLESPLLLDSPTSRTPPPPSCSSASSCSSSASSCSSASAASTPSGAPTCCASAAAAAAAALLYGTGGAEDLLAPGAPCAACSSASCANNAFAFGPELSSLITPLAIQTHNFAAVAAAAYYRSQQQQQQQGLAPPAQPPAPPSATLPAGAAAPPSPPFSFQLPRRLSDSPVFDAPPSPPDSLSDRDSYLSGSLSSGSLSGSESPSLDPGRRLPIFSRLSISDD

SEQ ID NO: 188 - protein, 837 aa, Homo sapiens;
MASKRKSTTPCMVRTSQVVEQDVPEEVDRAKEKGIGTPQPDVAKDSWAAELENSSKENEVIEVKSMGESQSKKLQGGYECKYCPYSTQNLNEFTEHVDMQHPNVILNPLYVCAECNFTTKKYDSLSDHNSKFHPGEANFKLKLIKRNNQTVLEQSIETTNHVVSITTSGPGTGDSDSGISVSKTPIMKPGKPKADAKKVPKKPEEITPENHVEGTARLVTDTAEILSRLGGVELLQDTLGHVMPSVQLPPNINLVPKVPVPLNTTKYNSALDTNATMINSFNKFPYPTQAELSWLTAASKHPEEHIRIWFATQRLKHGISWSPEEVEEARKKMFNGTIQSVPPTITVLPAQLAPTKVTQPILQTALPCQILGQTSLVLTQVTSGSTTVSCSPITLAVAGVTNHGQKRPLVTPQAAPEPKRPHIAQVPEPPPKVANPPLTPASDRKKTKEQIAHLKASFLQSQFPDDAEVYRLIEVTGLARSEIKKWFSDHRYRCQRGIVHITSESLAKDQLAIAASRHGRTYHAYPDFAPQKFKEKTQGQVKILEDSFLKSSFPTQAELDRLRVETKLSRREIDSWFSERRKLRDSMEQAVLDSMGSGKKGQDVGAPNGALSRLDQLSGAQLTSSLPSPSPAIAKSQEQVHLLRSTFARTQWPTPQEYDQLAAKTGLVRTEIVRWFKENRCLLKTGTVKWMEQYQHQPMADDHGYDAVARKATKPMAESPKNGGDVVPQYYKDPKKLCEEDLEKLVTRVKVGSEPAKDCLPAKPSEATSDRSEGSSRDGQGSDENEESSVVDYVEVTVGEEDAISDRSDSWSQAAAEGVSELAESDSDCVPAEAGQA

SEQ ID NO: 189 - DNA, 1503 bp, Homo sapiens;
atggcctccatgttgctcgcccagcgcctggcctgcagcttccagcacagctaccgcctgctggtgcctggatccagacacattagtcaagctgcagccaaagtcgacgttgaatttgattatgatgggcctctgatgaagacggaagtcccagggcctagatctcaggagttaatgaaacagctgaatataattcagaatgcagaggctgtgcattttttctgcaattacgaagagagccgaggcaattacctggttgatgtggacggcaaccgaatgctggatctttattcccagatctcctctgtccccataggttacagccaccccgccctgctgaaactcatccaacagcctcaaaatgcgagcatgtttgtcaacagacccgccctcggaatcctgcctccggagaactttgtggagaagctccggcagtccttgctctcggtggctcccaaagggatgtcccagctcatcaccatggcctgcggctcctgctccaatgaaaacgccttaaagaccatcttcatgtggtaccggagcaaggaaagagggcagaggggcttctcccaggaggagctggagacgtgcatgattaaccaggcccctggctgccccgactacagcatcctctccttcatgggcgcgttccatgggaggaccatgggttgcttagcgaccacgcactctaaagccattcacaagatcgacatcccttcctttgactggcccatcgcaccgttcccacggctgaaataccctctggaagagtttgtgaaagagaaccaacaggaggaggcccgctgtctggaagaggtggaggatctgattgtgaaatatcggaaaaagaagaagacggtggccgggatcatcgtggagcccatccagtccgagggtggagacaaccacgcatccgatgacttctttcggaagctgagagacatcgccaggaagcatggctgcgccttcttggtggacgaggtccagaccggaggaggctgcacgggcaagttctgggcccatgagcactggggcctggatgacccagcagacgtgatgaccttcagcaagaagatgatgactgggggcttcttccacaaggaggagttcaggcctaatgctccctaccggatcttcaacacctggctgggggacccgtccaagaacctgttgctggctgaggtcatcaacatcatcaagcgggaggacctgctaaataatgcagcccatgccgggaaggccctgctcacaggactgctggacctccaggcccggtacccccagttcatcagcagggtgagaggacgaggcaccttttgctccttcgatactcccgatgattccatacggaataagctcattttaattgccagaaacaaaggtgtggtgttgggtggctgtggtgacaaatccattcgtttccgtcccacgctggtcttcagggatcaccacgctcacctgttcctcaatattttcagtgacatcttagcagacttcaagtaa

SEQ ID NO: 190 - DNA, 1278 bp, Homo sapiens;
atgaatgccatgctggagactcccgaactcccagccgtgtttgatggagtgaagctggctgcagtggctgctgtgctgtacgtgatcgtccggtgtttgaacctgaagagccccacagccccacctgacctctacttccaggactcggggctctcacgctttctgctcaagtcctgtcctcttctgaccaaagaatacattccaccgttgatctgggggaaaagtggacacatccagacagccttgtatgggaagatgggaagggtgaggtcgccacatccttatgggcaccggaagttcatcactatgtctgatggagccacttctacattcgacctcttcgagcccttggctgagcactgtgttggagatgatatcaccatggtcatctgccctggaattgccaatcacagcgagaagcaatacatccgcactttcgttgactacgcccagaaaaatggctatcggtgcgccgtgctgaaccacctgggtgccctgcccaacattgaattgacctcgccacgcatgttcacctatggctgcacgtgggaatttggagccatggtgaactacatcaagaagacatatcccctgacccagctggtcgtcgtgggcttcagcctgggtggtaacattgtgtgcaaatacttgggggagactcaggcaaaccaagagaaggtcctgtgctgcgtcagcgtgtgccaggggtacagtgcactgagggcccaggaaaccttcatgcaatgggatcagtgccggcggttctacaacttcctcatggctgacaacatgaagaagatcatcctctcgcacaggcaagctctttttggagaccatgttaagaaaccccagagcctggaagacacggacttgagccggctctacacagcaacatccctgatgcagattgatgacaatgtgatgaggaagtttcacggctataactccctgaaggaatactatgaggaagaaagttgcatgcggtacctgcacaggatttatgttcctctcatgctggttaatgcagctgacgatccgttggtgcatgaaagtcttctaaccattccaaaatctctttcagagaaacgagagaacgtcatgtttgtgctgcctctgcatgggggccacttgggcttctttgagggctctgtgctgttccccgagcccctgacatggatggataagctggtggtggagtacgccaacgccatttgccaatgggagcgtaacaagttgcagtgctctgacacggagcaggtggaggccgacctggagtga

SEQ ID NO: 191 - DNA, 1527 bp, Homo sapiens;
atggcagagctgcagatgttactagaggaggagatcccgtctggcaagagggcgctgatcgagagttaccagaacctgactcgggtggcagactactgtgaaaacaactacatacaggctacagacaagagaaaagctttagaggagaccaaagcctatacaacccaatctctagctagtgttgcttatcaaataaatgcattggccaacaatgtactccagttgctggatatccaagcctctcagcttcggagaatggagtcttccatcaatcatatctcacagactgtggatattcataaggagaaagtggcacgaagagagattggtattttgacaacaaataagaatacatcaagaactcacaaaataatagcacctgcgaatatggagcgccctgtaaggtatattcggaaacctatcgattacacagttctggatgatgtgggccatggtgtcaagtggctaaaagccaagcatggaaataaccagcctgcaagaactggcacactgtcgagaacaaatcctcctactcagaaaccgccaagtcctcccatgtcaggccggggaacactgggacggaatactccttataaaaccctggaacctgttaaacccccaacagttcctaatgactatatgaccagtcctgctaggcttggaagtcagcatagtccaggcaggacagcatctttaaatcagagaccaaggacacacagtggaagtagtggaggaagtggaagtcgagaaaacagtggtagcagtagtattggcattcccattgctgtgcctacaccttcgccacccactattggaccagaaaacatttctgtccctcctccttctggagctccaccagcaccacctctggcaccacttctcccagtgagcactgtgatagcagccccgggctcagctcctggttcccagtatggcacaatgaccaggcagatatctcgacacaactctactacttcttcgacatcttctggtggatacagacgaactccctctgtgactgctcaattttctgctcagcctcatgttaatggaggtccactttattctcaaaattcaatttctattgctccaccccctccccctatgcctcagttgactccacagatacctctcacaggcttcgtggccagggtgcaggaaaacattgctgatagtccaactccaccgccaccacctccaccagatgacattcccatgtttgatgactctccacctcccccaccaccaccaccagtggattatgaagatgaggaggctgcagtagttcagtataatgatccatatgcagatggggatcctgcttgggcccccaagaattatattgagaaagttgttgcaatatatgattatacaaaagacaaggatgatgagctgtcatttatggagggtgcaatcatttatgttataaagaagaatgatgatggctggtatgaaggagtctgcaatcgagtgactggtctgttccctgggaactatgttgaatcaatcatgcactatactgattaa

SEQ ID NO: 192 - DNA, 2337 bp, Homo sapiens;
atgcctgccttccttggtctaaagtgtctggggaaattgtgcagctctgagaaaagcaaagtcacctcatctgagagaaccagtgccaggggctcgaacagaaagagactgattgttgaggaccggagggtctctgggacctccttcaccgctcataggcgtgccactatcactcatttgctgtatctctgtcccaaggactactgcccacgtgggcgtgtatgtaacagcgttgatccttttgtggcccaccctcaggaccctcaccacccatcagagaagcctgtcattcactgccataaatgtggggagccttgcaagggtgaagtgcttcgggtccagaccaaacatttccacatcaagtgtttcacctgcaaagtgtgtggctgtgacctggcacaagggggcttcttcataaagaacggagagtatctctgcaccctggactaccagcggatgtacgggacacgctgccatggctgtggggagttcgtggagggcgaagtggtgactgctctgggcaagacctaccatcccaattgctttgcttgtactatctgcaagcgcccgtttccacccggagaccgagtcacattcaatgggagagactgcctttgtcaactctgtgcacagccgatgtcgtccagtccgaaagaaaccaccttctccagcaattgtgccggctgcggaagagatatcaagaatgggcaggcgctgctggcgctggataagcagtggcacttggggtgctttaaatgcaagtcctgcgggaaggtcctcaccggggagtacatcagcaaggatggtgctccgtactgtgaaaaggactaccagggactctttggggtgaaatgtgaggcgtgtcaccagtttatcacagggaaagtcctggaggcaggtgacaaacattaccaccccagctgtgcacgatgcagcagatgcaaccagatgttcacagaaggagaggaaatgtatcttcaaggctccaccgtttggcatcccgactgtaagcaatctacgaagaccgaggaaaagctgcggcctaccaggacatcctcggaaagtatttattctaggccaggctccagtattcctggctcaccaggtcatactatctatgcaaaagtagacaatgagatcctggattacaaggatttagcagccattccgaaggtcaaggcaatttatgacattgaacgtccagatcttattacctatgagcctttctacacttcgggctatgatgacaaacaggagagacagagccttggagagtctccgaggactttgtctcctactccatcagcagaagggtaccaggatgttcgggatcggatgatccatcggtccacgagccagggctccatcaactcccctgtgtacagccgccacagctacactccaaccacgtcccgctctccccagcatttccacagacctggcaatgagccgtccagcggccggaactcccctctcccttaccggccagacagccgccctctaactccaacttacgctcaggcccctaaacatttccatgttccagatcaaggaatcaacatttaccgaaagccacccatctacaaacagcatgctgccttggcagcccagagcaagtcctcagaagatatcatcaagttttccaagttcccagcagcccaggcaccagaccccagcgagacaccaaagattgagacggaccactggcctggtcccccctcatttgctgtcgtaggacctgacatgaaacgcagatctagtggcagagaggaagatgatgaggaacttctgagacgtcggcagcttcaagaagagcaattaatgaagcttaactcaggcctgggacagttgatcttgaaagaagagatggagaaagagagccgggaaaggtcatctctgttagccagtcgctacgattctcccatcaactcagcttcacatattccatcatctaaaactgcatctctccctggctatggaagaaatgggcttcaccggcctgtttctaccgacttcgctcagtataacagctatggggatgtcagcgggggagtgcgagattaccagacactcccagatggccacatgcctgcaatgagaatggaccgaggagtgtctatgcccaacatgttggaaccaaagatatttccatatgaaatgctcatggtgaccaacagagggcgaaacaaaatcctcagagaggtggacagaaccaggctggagcgccacttagcccctgaagtgtttcgggaaatctttggaatgtccatacaggagtttgacaggttacctctttggagacgcaacgacatgaagaaaaaagcaaaactcttctaa

SEQ ID NO: 193 - DNA, 1275 bp, Homo sapiens;
atgcagaggctgcaggtagtgctgggccacctgaggggtccggccgattccggctggatgccgcaggccgcgccttgcctgagcggtgccccgcaggcctcggccgcggacgtggtggtggtgcacgggcggcgcacggccatctgccgggcgggccgcggcggcttcaaggacaccacccccgacgagcttctctcggcagtcatgaccgcggttctcaaggacgtgaatctgaggccggaacagctgggggacatctgtgtcggaaatgtgctgcagcctggggccggggcaatcatggcccgaatcgcccagtttctgagtgacatcccggagactgtgcctttgtccactgtcaatagacagtgttcgtcggggctacaggcagtggccagcatagcaggtggcatcagaaatgggtcttatgacattggcatggcctgtggggtggagtccatgtccctggctgacagagggaaccctggaaatattacttcgcgcttgatggagaaggagaaggccagagattgcctgattcctatggggataacctctgagaatgtggctgagcggtttggcatttcacgggagaagcaggatacctttgccctggcttcccagcagaaggcagcaagagcccagagcaagggctgtttccaagctgagattgtgcctgtgaccaccacggtccatgatgacaagggcaccaagaggagcatcactgtgacccaggatgagggtatccgccccagcaccaccatggagggcctggccaaactgaagcctgccttcaagaaagatggttctaccacagctggaaactctagccaggtgagtgatggggcagctgccatcctgctggcccggaggtccaaggcagaagagttgggccttcccatccttggggtcctgaggtcttatgcagtggttggggtcccacctgacatcatgggcattggacctgcctatgccatcccagtagctttgcaaaaagcagggctgacagtgagtgacgtggacatcttcgagatcaatgaggcctttgcaagccaggctgcctactgtgtggagaagctacgactcccccctgagaaggtgaaccccctggggggtgcagtggccttagggcacccactgggctgcactggggcacgacaggtcatcacgctgctcaatgagctgaagcgccgtgggaagagggcatacggagtggtgtccatgtgcatcgggactggaatgggagccgctgccgtctttgaataccctgggaactga

SEQ ID NO: 194 - DNA, 2337 bp, Homo sapiens;
atgaagatgactgtggatttcgaggagtgtctgaaggactcgccccgcttcagggcagctttggaagaagtagaaggtgatgtggcagaattggaactaaaacttgataagcttgtgaaactttgtattgcaatgattgatactggaaaagccttttgtgttgcaaataaacagttcatgaatgggattcgagacctggctcagtattctagtaatgatgctgtcgttgagacaagtttgaccaagttttctgacagtcttcaagaaatgataaattttcacacaatcctgtttgaccaaactcagagatcaattaaggcacagcttcagaactttgttaaagaagatcttagaaaattcaaagatgccaagaagcaattcgaaaaagtcagtgaagaaaaagaaaatgcgttagtaaaaaatgcccaagtacaaagaaacaaacaacatgaagttgaagaagccaccaacattctgacagcaacaagaaaatgtttccgacacatagccctcgattatgtgcttcagattaatgttcttcaatcaaaaaggagatcagaaatcctaaaatcaatgttgtcatttatgtatgcccatttggccttctttcatcaaggatatgatctgtttagtgaacttggaccctacatgaaggatcttggtgcacagttggatcgactggttgtggatgcagcaaaggagaaaagagaaatggagcaaaaacattccaccattcaacaaaaggatttctccagtgatgattctaagttagaatataacgtagatgctgcaaatggcatagttatggaaggatatctgttcaaacgagccagcaatgccttcaaaacttggaacaggcgctggttttcaatacagaataatcagttggtttaccagaaaaaatttaaggataatccgactgtggtagttgaagacctcaggctttgcacagtgaaacattgtgaagacatagagcgacgattctgctttgaggtggtctcgccaacaaaaagttgcatgctccaggcagattccgaaaagctgcgccaggcatggattaaggctgttcagaccagtattgctactgcttatagagagaagggtgatgaatcagagaagctggataagaaatcatctccatccacaggaagcctagattctggaaatgagtccaaagagaaattattgaaaggagaaagtgcgcttcagcgggtccagtgtatccctggcaatgccagctgttgtgactgtggcctggcagatccacggtgggccagcatcaacctgggcatcaccttgtgtatcgagtgctccggaattcaccggagccttggggttcatttttcaaaagtacgatctttaactttagacacctgggagccagaacttttaaagcttatgtgtgagttggggaatgatgttataaatcgagtttatgaagctaatgtggaaaaaatgggaataaagaaaccccaaccaggacaaagacaggagaaggaggcatatatcagagcaaaatatgtggagaggaaatttgtggataaatattctatatcattatcacctcctgagcagcaaaaaaagtttgtctctaaaagttctgaagaaaagaggctgagcatttctaaatttgggccaggggaccaagtcagagcatctgcccaaagttcagtcagaagtaatgacagtggaattcagcagagctctgatgatggaagagaatctttaccctccacggtgtcagccaatagtttatatgagcctgaaggagaaaggcaagattcttctatgtttcttgactcgaaacatcttaatccaggacttcagctttatagggcgtcatatgaaaaaaaccttcctaaaatggctgaggctttggctcatggtgcagacgtgaactgggccaattcagaggaaaacaaagcgacaccacttattcaggctgtattagggggctctttggtgacgtgtgagttcctcctacagaatggtgctaatgtcaaccaaagagatgtccaagggcggggaccattgcaccatgccaccgtcttagggcacacagggcaggtatgtttattcctaaaacgaggtgccaatcaacatgccactgatgaagaagggaaagaccctttgagcatagctgtggaagcagccaatgctgatatagtcaccttgttacgtttagcaagaatgaatgaagagatgcgggaatcagaaggactttatggacagccaggtgatgaaacttatcaggacatatttcgtgatttttcccaaatggcatccaataatccagagaaactaaatcgtttccagcaagattcacagaaattctga

SEQ ID NO: 195 - DNA, 1518 bp, Homo sapiens;
atggcggagtcggccggagcctcctccttcttcccccttgttgtcctcctgctcgccggcagcggcgggtccgggccccggggggtccaggctctgctgtgtgcgtgcaccagctgcctccaggccaactacacgtgtgagacagatggggcctgcatggtttccattttcaatctggatgggatggagcaccatgtgcgcacctgcatccccaaagtggagctggtccctgccgggaagcccttctactgcctgagctcggaggacctgcgcaacacccactgctgctacactgactactgcaacaggatcgacttgagggtgcccagtggtcacctcaaggagcctgagcacccgtccatgtggggcccggtggagctggtaggcatcatcgccggcccggtgttcctcctgttcctcatcatcatcattgttttccttgtcattaactatcatcagcgtgtctatcacaaccgccagagactggacatggaagatccctcatgtgagatgtgtctctccaaagacaagacgctccaggatcttgtctacgatctctccacctcagggtctggctcagggttacccctctttgtccagcgcacagtggcccgaaccatcgttttacaagagattattggcaagggtcggtttggggaagtatggcggggccgctggaggggtggtgatgtggctgtgaaaatattctcttctcgtgaagaacggtcttggttcagggaagcagagatataccagacggtcatgctgcgccatgaaaacatccttggatttattgctgctgacaataaagataatggcacctggacacagctgtggcttgtttctgactatcatgagcacgggtccctgtttgattatctgaaccggtacacagtgacaattgaggggatgattaagctggccttgtctgctgctagtgggctggcacacctgcacatggagatcgtgggcacccaagggaagcctggaattgctcatcgagacttaaagtcaaagaacattctggtgaagaaaaatggcatgtgtgccatagcagacctgggcctggctgtccgtcatgatgcagtcactgacaccattgacattgccccgaatcagagggtggggaccaaacgatacatggcccctgaagtacttgatgaaaccattaatatgaaacactttgactcctttaaatgtgctgatatttatgccctcgggcttgtatattgggagattgctcgaagatgcaattctggaggagtccatgaagaatatcagctgccatattacgacttagtgccctctgacccttccattgaggaaatgcgaaaggttgtatgtgatcagaagctgcgtcccaacatccccaactggtggcagagttatgaggcactgcgggtgatggggaagatgatgcgagagtgttggtatgccaacggcgcagcccgcctgacggccctgcgcatcaagaagaccctctcccagctcagcgtgcaggaagacgtgaagatctaa

SEQ ID NO: 196 - DNA, 444 bp, Homo sapiens;
atgagccaaaccagggatttacagggaggaaaagctttcggactgctgaaggcccagcaggaagagaggctggatgagatcaacaagcaattcctagacgatcccaaatatagcagtgatgaggatctgccctccaaactggaaggcttcaaagagaaatacatggagtttgaccttaatggaaatggcgatattgatatcatgtccctgaaacgaatgctggagaaacttggagtccccaagactcacctagagctaaagaaattaattggagaggtgtccagtggctccggggagacgttcagctaccctgactttctcaggatgatgctgggcaagagatctgccatcctaaaaatgatcctgatgtatgaggaaaaagcgagagaaaaggaaaagccaacaggccccccagccaagaaagctatctctgagttgccctga

SEQ ID NO: 197 - DNA, 1458 bp, Homo sapiens;
atggagctcgaagtccggcgggtccgacaggcgttcctgtccggccggtcgcgacctctgcggtttcggctgcagcagctggaggccctgcggaggatggtgcaggagcgcgagaaggatatcctgacggccatcgccgccgacctgtgcaagagtgaattcaatgtgtacagtcaggaagtcattactgtccttggggaaattgattttatgcttgagaatcttcctgaatgggttactgctaaaccagttaagaagaacgtgctcaccatgctggatgaggcctatattcagccacagcctctgggagtggtgctgataatcggagcttggaattaccccttcgttctcaccattcagccactgataggagccatcgctgcaggaaatgctgtgattataaagccttctgaactgagtgaaaatacagccaagatcttggcaaagcttctccctcagtatttagaccaggatctctatattgttattaatggtggtgttgaggaaaccacggagctcctgaagcagcgatttgaccacattttctatacgggaaacactgcggttggcaaaattgtcatggaagctgctgccaagcatctgacccctgtgactcttgaactgggagggaaaagtccatgttatattgataaagattgtgacctggacattgtttgcagacgcataacctggggaaaatacatgaattgtggccaaacctgcattgcacccgactatattctctgtgaagcatccctccaaaatcaaattgtatggaagattaaggaaacagtgaaggaattttatggagaaaatataaaagagtctcctgattatgaaaggatcatcaatcttcgtcattttaagaggatactaagtttgcttgaaggacaaaagatagcttttggtggggagactgatgaggccacacgctacatagccccaacagtacttaccgatgttgatcctaaaaccaaggtgatgcaagaagaaatttttggaccaattcttccaatagtgcctgtgaaaaatgtagatgaggccataaatttcataaatgaacgtgaaaagcctctggctctttatgtattttcgcataaccataagctcatcaaacggatgattgatgagacatccagtggaggtgtcacaggcaatgacgtcattatgcacttcacgctcaactctttcccatttggaggagtgggttccagtgggatgggagcttatcacggaaaacatagttttgatactttttctcatcagcgtccctgtttattaaaaagtttaaagagagaaggtgctaacaaactcagatatcctcccaacagccagtcaaaggtggattggggaaaattttttctcttgaaacggttcaacaaagaaaaactcggtctcctgttgctcactttcctgggtattgtagccgctgtgcttgtcaaggcagaatattactga

SEQ ID NO: 198 - DNA, 720 bp, Homo sapiens;
atggaaaaagaaaaaggaaatgatgatggaataccagaccaagagaattccttggatttttctgaacactttaaccaacttgaattgttggaaacacatggacaccttattcctactggtactcaaagtctttgggtaggcaattctgatgaagatgaggagcaagatgacaaaaatgaagagtggtatcgattgcaagaaaaaaaaatggaaaaagacccaagcagattgcttctttgggctgctgaaaaaaatcggcttaccacagtgcggagactcctttctgaaaaggccactcacgtgaacactagggatgaagatgagtatacccctcttcatcgagcagcctacagtggacacttagatattgttcaggagctcattgcacagggggccgatgttcatgcagtgactgtggatggctggacgcccctgcacagtgcttgtaagtggaataataccagagtggcttctttcttactgcagcatgatgcagatatcaatgcccaaacaaaaggcctcttgacccccttgcatcttgctgctgggaacagagacagcaaggataccctagaactcctcctgatgaaccgttacgtcaaaccagggctgaaaaacaacttggaagaaactgcatttgatattgccaggaggacaagtatctatcactacctctttgaaattgtggaaggctgtacaaattcttcacctcagtcttaa

SEQ ID NO: 199 - DNA, 1728 bp, Homo sapiens;
atgcagtccccctggaaaatccttacggtggcgcctctattcttgctcctgtctcttcagtcctcggcctctccagccaacgatgaccagtccaggcccagcctctcgaatgggcacacctgtgtagggtgtgtgctggtggtgtctgtaatagaacagcttgctcaagttcacaactcgacggtccaggcctcgatggagagactgtgcagctacctgcctgaaaaactgttcttgaaaaccacctgctatttagtcattgacaagtttggatcagacatcataaaactgcttagcgcagatatgaatgctgatgtggtatgtcacactctggagttttgtaaacagaacactggccaaccattgtgtcatctctaccctcttcccaaggagacatggaaatttacactacagaaggcaagacaaattgtcaagaagtccccgattctgaaatattctagaagtggttctgacatttgttcactcccggttttggccaagatctgccagaaaattaaattagctatggaacagtctgtgccattcaaagatgtggattcagacaaatacagcgttttcccaacactgcggggctatcactggcgggggagagactgtaatgacagcgacgagtcagtgtacccaggtagaaggccgaacaactgggatgtccatcaggattcaaactgtaatggcatttggggtgtcgatccaaaagatggagttccatatgagaagaaattctgtgaaggttcacagcccaggggaatcattttgctgggagactcagctggggctcattttcacatctctcctgaatggatcacagcgtcgcagatgtctttgaactctttcatcaatctaccaacagcccttaccaacgagcttgactggccccaactctctggtgctacaggatttctggactccactgttggaattaaagaaaaatctatttaccttcgcttatggaaaagaaaccactgtaatcacagggactaccagaatatttcaagaaatggtgcatcttcccgaaacctgaagaaatttatagaaagcttgtctagaaacaaggtgttggactatcccgccatcgttatatatgccatgattggaaatgatgtctgcagtgggaagagtgacccagtcccagccatgaccactcctgagaaactctactccaacgtcatgcagactctgaagcatctaaattcccacctgcccaatggcagccatgttattttgtatggcttaccagatggaacctttctctgggataatttgcacaacagatatcatcctctcggccagctaaataaagacatgacctatgcgcagttgtactccttcctgaactgcctccaggtcagcccctgccacggctggatgtcttccaacaagacgttgcggactctcacttcagagagagcagagcaactctccaacacactgaaaaaaattgcagccagtgagaaatttacaaacttcaatcttttctacatggattttgccttccatgaaatcatacaggagtggcagaagagaggcggacagccctggcagctcatcgagcccgtggatggattccaccccaacgaggtggctttgctgttgttggcggatcatttctggaaaaaggtgcagctccagtggccccaaatcctgggaaaggagaatccgttcaacccccagattaaacaggtgtttggagaccaaggcgggcactga

SEQ ID NO: 200 - DNA, 2001 bp, Homo sapiens;
atgggtgagtcaagtgaagacatagaccaaatgttcagcactttgctgggagagatggatcttctgactcagagtttaggagttgacactctccctcctcctgaccctaatccacccagagctgaatttaactacagtgtggggtttaaagatttaaatgagtccttaaatgcactggaagaccaagatttagatgctctcatggcagatctggtagcagacataagtgaggctgagcagaggacaatccaggcacagaaagagtccttgcagaatcaacatcattcagcatctctacaagcatcaattttcagtggtgcagcctctcttggttatggaacaaatgttgctgccactggtatcagccaatatgaggatgacttaccacctccaccagccgatcctgtgttagaccttccactgccaccaccacctcctgaacctctctctcaggaagaggaagaagcccaagccaaggctgataaaattaagctggcgctggaaaaactgaaggaggccaaggttaagaagctcgtcgtcaaggtgcacatgaatgataacagcacaaagtcactgatggtggatgagcggcagctggcccgagatgttctggacaaccttttcgagaaaactcattgtgactgcaatgtagactggtgtctttatgaaatctacccggaactacaaattgagaggttttttgaagaccatgaaaatgttgttgaagtcttatcagactggacaagagacacagaaaataaaatactatttttggagaaagaggagaaatatgctgtatttaaaaacccccagaatttctacttggataacagaggaaaaaaagaaagcaaggaaactaatgagaaaatgaatgctaagaacaaggaatccttacttgaggaaagtttctgtggaacatctatcattgtaccagaactggaaggagctctttatttgaaagaagatggaaagaaatcctggaaaaggcgctattttcttttacgggcttctggaatttattatgtacccaaaggaaagactaagacatctcgagatctggcgtgttttatacagtttgaaaatgtcaacatttactatgggactcagcataaaatgaaatataaagcgcccactgactattgctttgttttaaagcacccccaaattcagaaggagtcccagtatatcaagtatctctgctgtgatgacacaagaacccttaaccagtgggtcatgggaatacggatagccaagtatgggaagactctctatgataactaccagcgggctgtggcaaaggctggacttgcctctcggtggacaaacttggggacagtcaatgcagctgcaccagctcagccatctacaggacctaaaacaggcaccacccagcccaatggacagattccccaggctacacattctgtcagtgctgttctccaagaggcccagagacatgctgaaacatcgaaggataagaagccagccctcgggaaccaccacgacccggcagtgccccgggccccgcacgcccccaagtccagcctgcccccgccccctccggtgcggaggtcctccgacaccagcggcagtcccgccacgcccctcaaggccaagggcacaggcggcgggggcttgcccgccccacccgacgacttcctgccgccgccgccaccgccgccgcccctcgatgaccctgagctcccgccgccgcccccggacttcatggagccgcccccagacttcgtgcccccgcccccgccgtcgtacgcagggatcgcgggctcagagctgcccccgccgccgccgccgccgcccgcgcccgcgcccgcccccgtccccgactccgccaggccgccccccgcggtggccaagaggcctcctgtgccccccaagaggcaagagaacccagggcaccccggcggagcaggaggcggggagcaagatttcatgtcagacctcatgaaagctttgcaaaagaagagaggcaacgtgtcctag

SEQ ID NO: 201 - DNA, 2292 bp, Homo sapiens;
atggcggccaccgggaccgcggccgccgcagccacgggcaggctcctgcttctgctgctggtggggctcacggcgcctgccttggcgctggccggctacatcgaggctcttgcagccaatgccggaacaggatttgctgttgctgagcctcaaatcgcaatgttttgtgggaagttaaatatgcatgtgaacattcagactgggaaatgggaacctgatccaacaggcaccaagagctgctttgaaacaaaagaagaagttcttcagtactgtcaggagatgtatccagagctacagatcacaaatgtgatggaggcaaaccagcgggttagtattgacaactggtgccggagggacaaaaagcaatgcaagagtcgctttgttacacctttcaagtgtctcgtgggtgaatttgtaagtgatgtcctgctagttccagaaaagtgccagtttttccacaaagagcggatggaggtgtgtgagaatcaccagcactggcacacggtagtcaaagaggcatgtctgactcagggaatgaccttatatagctacggcatgctgctcccatgtggggtagaccagttccatggcactgaatatgtgtgctgccctcagacaaagattattggatctgtgtcaaaagaagaggaagaggaagatgaagaggaagaggaagaggaagatgaagaggaagactatgatgtttataaaagtgaatttcctactgaagcagatctggaagacttcacagaagcagctgtggatgaggatgatgaggatgaggaagaaggggaggaagtggtggaggaccgagattactactatgacaccttcaaaggagatgactacaatgaggagaatcctactgaacccggcagcgacggcaccatgtcagacaaggaaattactcatgatgtcaaagctgtctgctcccaggaggcgatgacggggccctgccgggccgtgatgcctcgttggtacttcgacctctccaagggaaagtgcgtgcgctttatatatggtggctgcggcggcaacaggaacaattttgagtctgaggattattgtatggctgtgtgtaaagcgatgattcctccaactcctctgccaaccaatgatgttgatgtgtatttcgagacctctgcagatgataatgagcatgctcgcttccagaaggctaaggagcagctggagattcggcaccgcaaccgaatggacagggtaaagaaggaatgggaagaggcagagcttcaagctaagaacctccccaaagcagagaggcagactctgattcagcacttccaagccatggttaaagctttagagaaggaagcagccagtgagaagcagcagctggtggagacccacctggcccgagtggaagctatgctgaatgaccgccgtcggatggctctggagaactacctggctgccttgcagtctgacccgccacggcctcatcgcattctccaggccttacggcgttatgtccgtgctgagaacaaagatcgcttacataccatccgtcattaccagcatgtgttggctgttgacccagaaaaggcggcccagatgaaatcccaggtgatgacacatctccacgtgattgaagaaaggaggaaccaaagcctctctctgctctacaaagtaccttatgtagcccaagaaattcaagaggaaattgatgagctccttcaggagcagcgtgcagatatggaccagttcactgcctcaatctcagagacccctgtggacgtccgggtgagctctgaggagagtgaggagatcccaccgttccaccccttccaccccttcccagccctacctgagaacgaagacactcagccggagttgtaccacccaatgaaaaaaggatctggagtgggagagcaggatgggggactgatcggtgccgaagagaaagtgattaacagtaagaataaagtggatgaaaacatggtcattgacgagactctggatgttaaggaaatgattttcaatgccgagagagttggaggcctcgaggaagagcgggaatccgtgggcccactgcgggaggacttcagtctgagtagcagtgctctcattggcctgctggtcatcgcagtggccattgccacggtcatcgtcatcagcctggtgatgctgaggaagaggcagtatggcaccatcagccacgggatcgtggaggttgatccaatgctcaccccagaagagcgtcacctgaacaagatgcagaaccatggctatgagaaccccacctacaaatacctggagcagatgcagatttag

SEQ ID NO: 202 - DNA, 3618 bp, Homo sapiens;
atgaccaagaaggaggagcccccaccgagccgagtcccacgggccgtgcgcgtggccagtctgctgagcgagggagaggaactgtctggggacgaccaaggggatgaggaagaggatgaccacgcctatgagggcgtccccaatggcggatggcataccagcagcctgagcttgtccttgcccagcacaatagctgcgccacaccccatggacgggccgcctgggggctccacccccgtcacaccagtcatcaaggctggctggctggacaagaacccaccgcagggatcttacatctatcagaaacgatgggtgagactggatactgatcacctgcgatactttgacagtaacaaggacgcttactctaagcgctttatctctgtggcctgcatctcccacgtggctgccatcggggaccagaagtttgaagtgatcacaaacaaccgaacctttgccttccgggcagagagtgatgtggagcggaaggagtggatgcaggccctgcagcaggccatggctgagcagcgtgcccgggcccggctctctagcgcttatctgctgggagttccaggctcagagcagcctgaccgcgctggcagcctggagcttcgtggcttcaagaataagctgtacgtggccgtggtcggggacaaagtgcagctctacaagaatctagaggagtaccacctgggcattggcatcaccttcatcgacatgagcgtgggcaacgtgaaggaagtggaccggcgcagcttcgacctcaccacgccctaccgcatcttcagcttctctgctgactcagagctagagaaggagcagtggttggaggccatgcagggagccatcgctgaggccctgtctacctcggaggtggccgagcgcatctgggctgcagcccccaacaggttctgtgctgactgcggggctcctcagcctgactgggcctccatcaacctctgtgttgttatctgcaagcgctgtgcaggggagcaccgtggcctgggcgctggcgtctccaaggtgcggagcctgaagatggacaggaaggtgtggacagaaacacttatcgagctcttcttacagctggggaatggcgctgggaaccgcttctgggcagccaacgtgccccccagtgaggccctgcagcccagcagcagccccagcacccggcggtgccacctggaggccaagtaccgtgagggcaagtaccgccgctaccacccgctctttggcaaccaggaggagctggacaaggccctgtgtgctgcagtcaccaccacagacctggctgagacccaggcgctcctgggctgtggggctgggatcaactgcttctcgggggaccctgaggcccccacgcccctggctcttgcagagcaggcggggcagacgctgcagatggaattccttcggaacaaccggaccacagaggtgcctcggctggactcgatgaagcccctggaaaagcactactcagttgtcctgccgaccgtgagccacagtggcttcctctacaagactgcctctgccggcaagctgctacaggaccgccgggcccgggaagagttcagccggcgctggtgtgtccttggtgacggggtcctgagctactttgagaatgagcgggcagtgacccccaatggagagattcgggccagcgagattgtgtgcctggcagtgccccctcctgacacccatggctttgagcacacctttgaggtgtacacggagggagaacggctgtacctgtttgggctggagagtgcggagcaggctcatgagtgggtcaagtgtattgctaaggcattcgtgcctcccctagccgaggatctgctggcccgggattttgagcggctgggacgcctaccctacaaagctggcctgagcctacagcgggcccaggagggctggttctctctcagtggctcggagctccgtgctgtcttcccggaggggccctgcgaagagccgctgcaactacggaaactgcaggagctttccatccagggggacagtgagaaccaggtgctggtgctggtggagcgaaggaggacactgtacatacagggcgagcggcggctggacttcatgggttggctgggggccatccagaaagcagccgccagcatgggggacacgctgtcggagcagcagcttggggactcggatatcccggtgatcgtgtaccgctgtgtggactacatcacgcagtgcggcctgacctccgagggcatctaccgcaagtgtgggcagacatcgaagacacagcggctgctggagagcctgcggcaggatgcgcgctctgtgcacctcaaggagggcgagcagcacgtggatgatgtttcctcggcgctcaagcgcttcctgcgcgacctgcctgatgggctcttcactcgcgcccagcgcctaacctggctggaggcctcagagattgaggacgaggaggagaaggtctccaggtaccgagagctgctggtgcggctgccccctgtcaaccgggccacagtgaaggcccttatcagccacctgtactgtgttcagtgcttctcagacacgaaccagatgaacgtgcacaacctggcaattgtgtttgggcccacgctcttccagacagatgggcaggactacaaggctggccgtgtggtggaagacctcattaaccactatgtggtggtgtttagtgtggatgaggaagagctcaggaagcagcgggaggagatcactgccattgtgaagatgcgcgtggctggcactgccagtgggacccagcatgccggtgacttcatctgcacagtgtatctggaagagaagaaggcagagactgagcagcatatcaaggtcccagcatccatgactgctgaggagctcaccctggagatcctggatcgccggaacgtgggcatcagggagaaggactattggacctgctttgaggtcaacgagagggaggaggcagagcgccccctgcactttgcggagaaggtgctgcccatcctgcacgggctgggcacggacagccacctggtggtgaagaagcaccaggccatggaggccatgctgctgtacctggccagccgtgtcggtgacaccaagcatggcatgatgaagttccgtgaggaccgcagcctcctgggcctgggcctgccctcaggtggcttccacgatcgctacttcatcctcaacagcagctgcttgcggctctacaaggaggtccggagccagaggccgtggagcggggcccctgagaccagtcaccggcctgagaaggagtggcctattaagagtctcaaagtctacctgggagtgaagaagaaactcaggccacccacctgctggggcttcacagtggtgcatgagacagagaaacatgagaagcagcagtggtacctctgctgtgacacacagatggagctccgggagtggttcgctacctttctgtttgtgcagcatgacggcctggtgtggccctcagagccctcacgcgtgtcccgggcagtgcctgaggtccggctgggtagtgtgtcactgatcccccttcgaggtagtgaaaatgaaatgcgccggagtgtggctgccttcaccgcggaccctctgtctcttctgcgcaacgtctga

SEQ ID NO: 203 - DNA, 1428 bp, Homo sapiens;
atgcagaaatctacaaattctgatacttccgtggaaacactgaattctacccgccaaggcacaggagctgtgcaaatgagaatcaaaaatgccaacagccaccatgacaggctcagccaaagtaaatccatgatcctcaccgatgtcgggaaggtcactgaacctatatccagacacagaaggaatcattcacagcatatcttgaaagatgtcattcctccattggaacaactgatggttgaaaaagaaggttatctgcaaaaagctaaaattgcagatggaggaaagaaactaaggaaaaactggtctacttcctggattgttctttctagtcgaagaattgaattttacaaagaatccaagcaacaggctctgtccaatatgaaaactgggcacaaaccagaaagtgtggatttgtgtggagcacacattgaatgggccaaggaaaaatcgagcagaaagaatgtctttcagatcacaacagtatcaggaaatgagttccttctacagtcagatattgacttcatcatattggattggttccacgctatcaaaaatgcaattgacagattgccaaaggattcaagttgtccatcaagaaacctggaattattcaaaatccaaagatcctctagcactgaattgctaagtcactacgacagtgatataaaagaacagaaaccagagcacagaaaatctttaatgttcagactgcatcacagtgcttccgatacaagcgacaaaaatcgagttaaaagcagattaaagaagtttattacccgaagaccttccctgaaaactctgcaagaaaaaggacttattaaagatcaaatttttggctctcatctgcacaaagtgtgtgaacgtgaaaattccacagttccgtggtttgtaaagcaatgcattgaagctgttgagaaaagaggtctagatgttgatggaatatatcgagttagtggcaatctggcaacaatacagaagttaagatttattgtcaaccaagaagagaagctgaatttggacgacagccagtgggaggacatccacgttgtcaccggagcactgaagatgtttttccgggagctgcctgagccgctcttcccttacagtttctttgagcagtttgtggaagcgatcaaaaagcaagacaacaacacaagaattgaagctgtaaaatctcttgtacaaaaactccctccgccaaatcgtgacaccatgaaagtcctctttggacatctaactaagatagtggccaaagcctccaagaacctcatgtccacgcaaagcttggggattgtatttggacctacccttctgcgagctgaaaatgaaacaggaaacatggcgatccacatggtctaccagaaccagatagctgagctcatgctgagtgagtacagtaagatcttcggctcagaggaagactga

SEQ ID NO: 204 - DNA, 1917 bp, Homo sapiens;
atgtccctcggtcagtcggcctgtctgttcctctctatagctcggtcaaggagtgtgatgactggcgagcagatggctgccttccatccatcgtccacccccaacccgctggagaggcccatcaagatgggctggctgaagaagcagaggtccatcgtgaagaactggcagcagaggtactttgtgctgagggcgcagcagctctactactacaaggatgaagaggacacgaagccccagggctgcatgtatctaccaggatgtacaatcaaggagatcgccacaaacccagaagaagctgggaagtttgtctttgaaatcattccagcctcatgggaccagaatcgcatgggacaggactcctatgtcctcatggccagctctcaggcggagatggaggagtgggttaaattcctcaggagagttgctggcacaccctgtggagtgtttggccagcgcttggatgagactgtggcctatgaacagaaattcggcccccatctggtgcccatcctggtggagaaatgtgcagagttcatcctggagcacggccggaatgaagagggcatcttccgtctgcctgggcaggacaacctggtgaagcagctgagagacgcttttgatgctggggagcggccctcctttgacagagacacagatgtgcacactgtggcttccctgttaaagctctacctccgagacctcccagagcccgtggttccctggagccagtacgaagggttcctgctctgtgggcagctcacgaatgcggatgaggcaaaggctcagcaggagttgatgaagcagctctccatccttcctcgtgacaactatagtctcctgagctacatctgcaggttcctacatgaaatacagctgaactgtgctgttaacaagatgagtgtggacaacctggctactgtgattggtgtgaatctcatcaggtcgaaggtcgaagaccctgccgtgatcatgagagggactcctcagatccaaagagtgatgactatgatgatcagagaccatgaagtcctcttccccaagtccaaggatatacccctgtcaccccctgcccagaaaaatgaccccaagaaagctccagtggcccgaagctctgtaggctgggatgccactgaagacctccgaatttctaggacagacagcttcagtagcatgacaagcgactctgatacaaccagccccaccggacagcagccgagcgatgcgtttccggaggacagcagcaaagtacccagggaaaagccaggagactggaaaatgcaatctcgtaaaaggactcaaacactccctaaccggaaatgtttcttgacatcagcttttcagggtgccaacagcagcaaaatggagatctttaaaaatgaattctggtcgccttcctcagaggctaaggcaggggaagggcacaggagaacgatgtctcaagacttgcgccaactttctgactcccaacggacttccacctacgataacgtcccttccctgccagggtcccctggggaggaagccagtgcactctcttcccaagcctgtgactccaagggagatactcttgccagtccaaactctgaaactgggcctggaaaaaagaactctggagaagaggaaattgattctttgcagaggatggtccaagagctacgaaaggaaatagaaacacagaagcaaatgtatgaggaacagattaaaaaccttgagaaggaaaattatgacgtttgggctaaagtggtgaggctcaatgaagaactggagaaggaaaagaagaagtctgcagccctagagatcagcctccgcaacatggagcgctcccgggaggatgttgagaagaggaacaaggccttggaagaagaagtcaaggaatttgtcaaatccatgaaggaacccaagaccgaggcttaa

SEQ ID NO: 205 - DNA, 2445 bp, Homo sapiens;
atggggctcccagcgctcgagttcagcgactgctgcctcgatagtccgcacttccgagagacgctcaagtcgcacgaagcagagctggacaagaccaacaaattcatcaaggagctcatcaaggacgggaagtcactcataagcgcgctcaagaatttgtcttcagcgaagcggaagtttgcagattccttaaatgaatttaaatttcagtgcataggagatgcagaaacagatgatgagatgtgtatagcaagatctttgcaggagtttgccactgtcctcaggaatcttgaagatgaacggatacggatgattgagaatgccagcgaggtgctcatcactcccttggagaagtttcgaaaggaacagatcggggctgccaaggaagccaaaaagaagtatgacaaagagacagaaaagtattgtggcatcttagaaaaacacttgaatttgtcttccaaaaagaaagaatctcagcttcaggaggcagacagccaagtggacctggtccggcagcatttctatgaagtatccctggaatatgtcttcaaggtgcaggaagtccaagagagaaagatgtttgagtttgtggagcctctgctggccttcctgcaaggactcttcactttctatcaccatggttacgaactggccaaggatttcggggacttcaagacacagttaaccattagcatacagaacacaagaaatcgctttgaaggcactagatcagaagtggaatcactgatgaaaaagatgaaggagaatccccttgagcacaagaccatcagtccctacaccatggagggatacctctacgtgcaggagaaacgtcactttggaacttcttgggtgaagcactactgtacatatcaacgggattccaaacaaatcaccatggtaccatttgaccaaaagtcaggaggaaaagggggagaagatgaatcagttatcctcaaatcctgcacacggcggaaaacagactccattgagaagaggttttgctttgatgtggaagcagtagacaggccaggggttatcaccatgcaagctttgtcggaagaggaccggaggctctggatggaagccatggatggccgggaacctgtctacaactcgaacaaagacagccagagtgaagggactgcgcagttggacagcattggcttcagcataatcaggaaatgcatccatgctgtggaaaccagagggatcaacgagcaagggctgtatcgaattgtgggtgtcaactccagagtgcagaagttgctgagtgtcctgatggaccccaagactgcttctgagacagaaacagatatctgtgctgaatgggagataaagaccatcactagtgctctgaagacctacctaagaatgcttccaggaccactcatgatgtaccagtttcaaagaagtttcatcaaagcagcaaaactggagaaccaggagtctcgggtctctgaaatccacagccttgttcatcggctcccagagaaaaatcggcagatgttacagctgctcatgaaccacttggcaaatgttgctaacaaccacaagcagaatttgatgacggtggcaaaccttggtgtggtgtttggacccactctgctgaggcctcaggaagaaacagtagcagccatcatggacatcaaatttcagaacattgtcattgagatcctaatagaaaaccacgaaaagatatttaacaccgtgcccgatatgcctctcaccaatgcccagctgcacctgtctcggaagaagagcagtgactccaagcccccgtcctgcagcgagaggcccctgacgctcttccacaccgttcagtcaacagagaaacaggaacaaaggaacagcatcatcaactccagtttggaatctgtctcatcaaatccaaacagcatccttaattccagcagcagcttacagcccaacatgaactccagtgacccagacctggctgtggtcaaacccacccggcccaactcactccccccgaatccaagcccaacttcacccctctcgccatcttggcccatgttctcggcgccatccagccctatgcccacctcatccacgtccagcgactcatcccccgtcaggtctgttgcagggtttgtttggttttctgttgctgccgttgttctctcattggctcggtcctctcttcatgcagtgttcagcctcctcgtcaactttgttccctgccatccaaacctgcacttgctttttgacaggccagaagaagcggtacatgaagactccagcacaccgttccggaaggcaaaagccttgtatgcctgcaaagctgaacatgactcagaactttcgttcacagcaggcacggtcttcgataacgttcacccatctcaggagcctggctggttggaggggactctgaacggaaagactggcctcatccctgagaattacgtggagttcctctaa

SEQ ID NO: 206 - DNA, 2877 bp, Homo sapiens;
atgaaggaagccaaggatgcccgctataccaatgggcacctcttcaccaccatttcagtttcaggcatgaccatgtgctatgcctgtaacaagagcatcacagccaaggaagccctcatctgcccaacctgcaatgtgactatccacaaccgctgtaaagacaccctcgccaactgtaccaaggtcaagcagaagcaacagaaagcggccctgctgaagaacaacaccgccttgcagtccgtttctcttcgaagtaagacaaccatccgggagcggccaagctcggccatctacccctccgacagcttccggcagtccctcctgggctcccgccgtggccgctcctccttgtctttagccaagagtgtttctaccaccaacattgctggacatttcaatgatgagtctcccctggggctgcgccggatcctctcacagtccacagactccctcaacatgcggaaccgaaccctatccgtggaatccctcattgacgaagaggtaatctacagtgagctgatgagtgactttgagatggatgagaaggactttgcagctgactcttggagtcttgctgtggacagcagcttcctgcagcagcataaaaaggaggtgatgaagcagcaagatgtcatctatgagctaatccagacagagctgcaccatgtgaggacactgaagatcatgacccgcctcttccgcacggggatgctggaagagctacacttggagccaggagtggtccagggcctgttcccctgcgtggacgagctcagtgacatccatacacgcttcctcagccagctattagaacgccgacgccaggccctgtgccctggcagcacccggaactttgtcatccatcgcttgggtgatctgctcatcagccagttctcaggtcctagtgcggagcagatgtgtaagacctactcggagttctgcagccgccacagcaaggccttaaagctctataaggagctgtacgcccgagacaaacgcttccagcaattcatccggaaagtgacccgccccgccgtgctcaagcggcacggggtacaggagtgcatcctgctggtgactcagcgcatcaccaagtacccgttactcatcagccgcatcctgcagcattcccacgggatcgaggaggagcgccaggacctgaccacagcactggggctagtgaaggagctgctgtccaatgtggacgagggtatttatcagctggagaaaggggcccgtctgcaggagatctacaaccgcatggaccctcgggcccaaaccccagtgcctggcaagggcccctttggccgagaggaacttctgaggcgcaaactcatccacgatggctgcctgctctggaagacagcgacggggcgcttcaaagatgtgctagtgctgctgatgacagatgtactggtgtttctccaggaaaaggaccagaagtacatctttcctaccctggacaagccttcagtggtatcgctgcagaatctaatcgtacgagacattgccaaccaggagaaagggatgtttctgatcagcgcagccccacctgagatgtacgaggtgcacacagcatcccgggatgaccggagcacctggatccgggtcattcagcagagcgtgcgcacatgcccatccagggaggacttccccctgattgagacagaggatgaggcttacctgcggcgaattaagatggagttgcagcagaaggaccgggcactggtggagctgctgcgagagaaggtcgggctgtttgctgagatgacccatttccaggccgaagaggatggtggcagtgggatggccctgcccaccctgcccaggggccttttccgctctgagtcccttgagtcccctcgtggcgagcggctgctgcaggatgccatccgtgaggtggagggtctgaaagacctgctggtggggccaggagtggaactgctcttgacaccccgagagccagccctgcccttggaaccagacagcggtggtaacacgagtcctggggtcactgccaatggtgaggccagaaccttcaatggctccattgaactctgcagagctgactcagactctagccagagggatcgaaatggaaatcagctgagatcaccgcaagaggaggcgttacagcgattggtcaatctctatggacttctacatggcctacaggcagctgtggcccagcaggacactctgatggaagcccggttccctgagggccctgagcggcgggagaagctgtgccgagccaactctcgggatggggaggctggcagggctggggctgcccctgtggcccctgaaaagcaggccacggaactggcattactgcagcggcaacatgcgctgctgcaggaggagctacggcgctgccggcggctaggtgaagaacgggcaaccgaagctggcagcctggaggcccggctccgggagagtgagcaggcccgggcactgctggagcgtgaggccgaagaggctcgaaggcagctggccgccctgggccagaccgagccactcccagctgaggccccctgggcccgcagacctgtggatcctcggcggcgcagcctccccgcaggcgatgccctgtacttgagtttcaaccccccacagcccagccgaggcactgaccgcctggatctacctgtcactactcgctctgtccatcgaaactttgaggaccgagagaggcaggaactggggagccccgaagagcggctgcaagacagcagtgaccctgacactggcagcgaggaggaaggtagcagccgtctgtctccgccccacagtccacgagactttaccagaatgcaggacatcccggaggagacggagagccgcgacggggaggctgtagcctccgagagctaa

SEQ ID NO: 207 - DNA, 1257 bp, Homo sapiens;
atgggcgacaaagggacccgagtgttcaagaaggccagtccaaatggaaagctcaccgtctacctgggaaagcgggactttgtggaccacatcgacctcgtggaccctgtggatggtgtggtcctggtggatcctgagtatctcaaagagcggagagtctatgtgacgctgacctgcgccttccgctatggccgggaggacctggatgtcctgggcctgacctttcgcaaggacctgtttgtggccaacgtacagtcgttcccaccggcccccgaggacaagaagcccctgacgcggctgcaggaacgcctcatcaagaagctgggcgagcacgcttaccctttcacctttgagatccctccaaaccttccatgttctgtgacactgcagccggggcccgaagacacggggaaggcttgcggtgtggactatgaagtcaaagccttctgcgcggagaatttggaggagaagatccacaagcggaattctgtgcgtctggtcatccggaaggttcagtatgccccagagaggcctggcccccagcccacagccgagaccaccaggcagttcctcatgtcggacaagcccttgcacctagaagcctctctggataaggagatctattaccatggagaacccatcagcgtcaacgtccacgtcaccaacaacaccaacaagacggtgaagaagatcaagatctcagtgcgccagtatgcagacatctgccttttcaacacagctcagtacaagtgccctgttgccatggaagaggctgatgacactgtggcacccagctcgacgttctgcaaggtctacacactgacccccttcctagccaataaccgagagaagcggggcctcgccttggacgggaagctcaagcacgaagacacgaacttggcctctagcaccctgttgagggaaggtgccaaccgtgagatcctggggatcattgtttcctacaaagtgaaagtgaagctggtggtgtctcggggcggcctgttgggagatcttgcatccagcgacgtggccgtggaactgcccttcaccctaatgcaccccaagcccaaagaggaacccccgcatcgggaagttccagagaacgagacgccagtagataccaatctcatagaacttgacacaaatgatgacgacattgtatttgaggactttgctcgccagagactgaaaggcatgaaggatgacaaggaggaagaggaggatggtaccggctctccacagctcaacaacagatag

SEQ ID NO: 208 - DNA, 1230 bp, Homo sapiens;
atgggggagaaacccgggaccagggtcttcaagaagtcgagccctaactgcaagctcaccgtgtacttgggcaagcgggacttcgtagatcacctggacaaagtggaccctgtagatggcgtggtgcttgtggaccctgactacctgaaggaccgcaaagtgtttgtgaccctcacctgcgccttccgctatggccgtgaagacctggatgtgctgggcttgtccttccgcaaagacctgttcatcgccacctaccaggccttccccccggtgcccaacccaccccggccccccacccgcctgcaggaccggctgctgaggaagctgggccagcatgcccaccccttcttcttcaccataccccagaatcttccatgctccgtcacactgcagccaggcccagaggatacaggaaaggcctgcggcgtagactttgagattcgagccttctgtgctaaatcactagaagagaaaagccacaaaaggaactctgtgcggctggtgatccgaaaggtgcagttcgccccggagaaacccggcccccagccttcagccgaaaccacacgccacttcctcatgtctgaccggtccctgcacctcgaggcttccctggacaaggagctgtactaccatggggagcccctcaatgtaaatgtccacgtcaccaacaactccaccaagaccgtcaagaagatcaaagtctctgtgagacagtacgccgacatctgcctcttcagcaccgcccagtacaagtgtcctgtggctcaactcgaacaagatgaccaggtatctcccagctccacattctgtaaggtgtacaccataaccccactgctcagcgacaaccgggagaagcggggtctcgccctggatgggaaactcaagcacgaggacaccaacctggcttccagcaccatcgtgaaggagggtgccaacaaggaggtgctgggaatcctggtgtcctacagggtcaaggtgaagctggtggtgtctcgaggcggggatgtctctgtggagctgccttttgttcttatgcaccccaagccccacgaccacatccccctccccagaccccagtcagccgctccggagacagatgtccctgtggacaccaacctcattgaatttgataccaactatgccacagatgatgacattgtgtttgaggactttgcccggcttcggctgaaggggatgaaggatgacgactatgatgatcaactctgctag

SEQ ID NO: 209 - DNA, 3390 bp, Homo sapiens;
atgagatcttcagcctccaggctctccagtttttcgtcgagagattcactatggaatcggatgccggaccagatctctgtctcggagttcatcgccgagaccaccgaggactacaactcgcccaccacgtccagcttcaccacgcggctgcacaactgcaggaacaccgtcacgctgctggaggaggctctagaccaagatagaacagcccttcagaaagtgaagaagtctgtaaaagcaatatataattctggtcaagatcatgtacaaaatgaagaaaactatgcacaagttcttgataagtttgggagtaattttttaagtcgagacaaccccgaccttggcaccgcgtttgtcaagttttctactcttacaaaggaactgtccacactgctgaaaaatctgctccagggtttgagccacaatgtgatcttcaccttggattctttgttaaaaggagacctaaagggagtcaaaggagatctcaagaagccatttgacaaagcctggaaagattatgagacaaagtttacaaaaattgagaaagagaaaagagagcacgcaaaacaacatgggatgatccgcacagagataacaggagctgagattgcggaagaaatggagaaggaaaggcgcctctttcagctccaaatgtgtgaatatctcattaaagttaatgaaatcaagaccaaaaagggtgtggatctgctgcagaatcttataaagtattaccatgcacagtgcaatttctttcaagatggcttgaaaacagctgataagttgaaacagtacattgaaaaactggctgctgatttatataatataaaacagacccaggatgaagaaaagaaacagctaactgcactccgagacttaataaaatcctctcttcaactggatcagaaagaagattctcagagccggcaaggaggatacagcatgcatcagctccagggcaataaggaatatggcagtgaaaagaaggggtacctgctaaagaaaagtgacgggatccggaaagtatggcagaggaggaagtgttcagtcaagaatgggattctgaccatctcacatgccacatctaacaggcaaccagccaagttgaaccttctcacctgccaagtaaaacctaatgccgaagacaaaaaatcttttgacctgatatcacataatagaacatatcactttcaggcagaagatgagcaggattatgtagcatggatatcagtattgacaaatagcaaagaagaggccctaaccatggccttccgtggagagcagagtgcgggagagaacagcctggaagacctgacaaaagccattattgaggatgtccagcggctcccagggaatgacatttgctgcgattgtggctcatcagaacccacctggctttcaaccaacttgggtattttgacctgtatagaatgttctggcatccatagggaaatgggggttcatatttctcgcattcagtctttggaactagacaaattaggaacttctgaactcttgctggccaagaatgtaggaaacaatagttttaatgatattatggaagcaaatttacccagcccctcaccaaaacccaccccttcaagtgatatgactgtacgaaaagaatatatcactgcaaagtatgtagatcataggttttcaaggaagacctgttcaacttcatcagctaaactaaatgaattgcttgaggccatcaaatccagggatttacttgcactaattcaagtctatgcagaaggggtagagctaatggaaccactgctggaacctgggcaggagcttggggagacagcccttcaccttgccgtccgaactgcagatcagacatctctccatttggttgacttccttgtacaaaactgtgggaacctggataagcagacggccctgggaaacacagttctacactactgtagtatgtacagtaaacctgagtgtttgaagcttttgctcaggagcaagcccactgtggatatagttaaccaggctggagaaactgccctagacatagcaaagagactaaaagctacccagtgtgaagatctgctttcccaggctaaatctggaaagttcaatccacacgtccacgtagaatatgagtggaatcttcgacaggaggagatagatgagagcgatgatgatctggatgacaaaccaagccctatcaagaaagagcgctcacccagacctcagagcttctgccactcctccagcatctccccccaggacaagctggcactgccaggattcagcactccaagggacaaacagcggctctcctatggagccttcaccaaccagatcttcgtttccacaagcacagactcgcccacatcaccaaccacggaggctccccctctgcctcctaggaacgccgggaaaggtccaactggcccaccttcaacactccctctaagcacccagacctctagtggcagctccaccctatccaagaagaggcctcctcccccaccacccggacacaagagaaccctatccgaccctcccagcccactacctcatgggcccccaaacaaaggcgcagttccttggggtaacgatgggggtccatcctcttcaagtaagactacaaacaagtttgagggactatcccagcagtcgagcaccagttctgcaaagactgcccttggcccaagagttcttcctaaactacctcagaaagtggcactaaggaaaacagatcatctctccctagacaaagccaccatcccgcccgaaatctttcagaaatcatcacagttggcagagttgccacaaaagccaccacctggagacctgcccccaaagcccacagaactggcccccaagccccaaattggagatttgccgcctaagccaggagaactgccccccaaaccacagctgggggacctgccacccaaaccccaactctcagacttacctcccaaaccacagatgaaggacctgccccccaaaccacagctgggagacctgctagcaaaatcccagactggagatgtctcacccaaggctcagcaaccctctgaggtcacactgaagtcacacccattggatctatccccaaatgtgcagtccagagacgccatccaaaagcaagcatctgaagactccaacgacctcacgcctactctgccagagacgcccgtaccactgcccagaaaaatcaatacggggaaaaataaagtgaggcgagtgaagaccatttatgactgccaggcagacaacgatgacgagctcacattcatcgagggagaagtgattatcgtcacaggggaagaggaccaggagtggtggattggccacatcgaaggacagcctgaaaggaagggggtctttccagtgtcctttgttcatatcctgtctgactag

SEQ ID NO: 210 - DNA, 4377 bp, Homo sapiens;
atggtgaacacccggaagagctctctccgccttctcgggtccaagtctcctggtcccgggcctgggcctggggccggagcagagcctggggcgaccggaggcagcagccatttcatctcctctcggacccgctcctccaagacccgcgccgccagctgccccgccgccaaagccgggggaagcggtggcgccggcgtcactctggatgaggccaggaaagttgaagttgatggtagtttaagtgatagccacgtatctcctccagccaaacgcactttgaaacaacctgattctgtttgcaaagacaaatcaaaatcacgaagtactggtcagcgagaggaatggaacttatcaactggacaggccaggttaacttctcagcctggtgctacattaccaaatggacatagtggcttatcccttcgaagccatccccttcgaggggaaaagaagggagatggggacctttcttgtataaatggtgacatggaagtcagaaaaagttgtcgttccaggaaaaacagatttgaaagtgtgaaccagagtttgttatttgatcaactagtaaatagcactgctgaagctgtactacaggaaatggacaacattaacatccgacggaatcgtcgatcaggagaagtagaacgacttcgaatgtggacagatacagaatttgaaaacatggatatgtattcaagagtgaaaaggcgaagaaagtcactaagaagaaatagttatgggatacaaaatcatcatgaagtttctactgagggtgaagaagaagaatctcaagaggaggatggagatatagaagttgaagaggcagaaggagaagaaaatgatagaccatataatttgagacagagaaaaacagtggatcgataccaagcacctccaatagtaccagctcatcaaaaaaagagggaaaacacgctgtttgatattcatagatctccagcaagaagaagccatattaggagaaagaagcatgccattcatagtagtgacacaacttcttctgatgaggaacgctttgaaagaaggaaatcaaagagcatggcaagagcaagaaatagatgtttgcctatgaacttcagagcagaggacttagctagcggtattctccgagaacgagtgaaagtgggtgcaagcttggctgatgttgatccaatgaacattgataaatcagtacggtttgatagcataggtggattgagccatcatattcatgcgctaaaggaaatggtagtattcccacttttatatccagaaatttttgaaaagtttaaaattcagcctccaaggggctgtttgttttatggccctcctggcacaggtaaaaccttggttgccagagcattagctaatgaatgcagccaaggagacaaaaaagtggctttttttatgcgaaaaggagcagattgtttgagcaagtgggttggtgaatctgaaaggcaacttaggcttctttttgatcaggcatatttgatgagaccttctataatattttttgatgaaatagatggattagctccagttcgctctagcagacaagatcagatccacagctctatagtatcaaccctccttgctcttatggatggattagataataggggtgaaattgttgttattggtgctacaaacagacttgactctatagatcctgcactcaggagacctggtcgttttgacagagaattcctcttcaacctgcctgatcaaaaggcaagaaaacacatcttacagatccataccagggactggaatccaaaattgtcagatgcatttttaggtgaattggctgaaaaatgtgttggctactgtggagccgatatcaaggccctgtgcactgaagccgccctgattgcactgcggaggcgttatccccagatctatgctagcagtcataaactgcagctggatgtttcctcaatagtgcttagtgcccaagatttttaccatgcaatgcagaatatcgtgcctgcttcccaacgtgctgtgatgtcttcagggcatgcactatcccccatcataagaccactgctggaaagaagcttcaacaacatcctagcagtcttgcaaaaagtgtttcctcatgctgaaattagccagagtgacaaaaaagaagatatagaaactttaattttagaggatagtgaagatgaaaatgctttatcaatttttgagaccaattgtcactcaggatcaccaaagaaacagtcatcatctgctgctatacataaaccctaccttcattttacaatgtcaccatatcatcagccaacctcttacaggccacgcttattgctctctggagaacggggctcaggtcaaacttctcaccttgctccagcacttttgcacactctagaaagattctctgtgcatagactagatctcccagcactttattcagttagtgccaaaacacctgaggaatcatgtgcacagatttttcgtgaagctcgaagaacagtacctagtattgtttacatgcctcacattggggattggtgggaagctgtcagtgaaactgtgagagcaacttttctgacattgctacaagatataccatcattttcacctatatttttattgtctacctctgaaaccatgtacagtgaactgcctgaagaggttaaatgtatctttagaatacagtatgaagaggtcttgtatattcaaaggcctattgaagaagacagaagaaaattttttcaagaattgattctcaatcaggcatcaatggctccaccacgaaggaaacatgctgctctttgtgctatggaagtgcttcctcttgcactaccttctccacctcgtcaattatcagaatcagaaaaaagtcgaatggaggaccaggaggaaaatactttaagagagttgcggttgtttctcagggatgtaaccaagaggctggccacagataaacgctttaacatcttcagcaaaccggtggatattgaagaggtttcagattatcttgaagtaatcaaggaaccaatggacttatcaacagtaataactaaaattgataaacataattacctgactgcaaaggatttcctgaaagatattgacctcatctgtagcaatgctttagagtataatccagataaggacccaggagataaaataattaggcacagggcttgtaccctgaaggacactgcacatgctatcattgcagctgaattagatccagaatttaataaactttgtgaggaaattaaggaagcaagaataaaaagaggcttatcagtaacatcagaacaaataaatcctcatagtactggagctcggaagacagaaactagagtcgaagaggcatttcggcacaaacaaagaaatccaatggatgtgtggcacaactctgcaaataaatgtgcatttcgggttcggagaaaatcaaggcggagatcacagtggggtaaaggaattattaagaaaaggaaagttaataatttaaaaaaagatgaagaagacaccaaatttgcagactatgagaaccatacggaggacaggaaattattagagaatggagagtttgaggtaagcactgactgccatgaggaaaatggagaagagactggagacttatctatgaccaatgatgaatcatcctgtgacatcatggacttggaccaggggcagaggcttaacaatggagcaggcacaaaagagaactttgcatctactgaggaggaaagttcaaatgaatctctactggtcaacagcagcagttccttaaacccggagcagacctccaggaaagagactttccttaaaggaaattgtctaaatggtgaggcttccactgacagttttgaaggaataccagttctggaatgtcagaatggcaagcttgaagtagtttctttctgtgatagtggagataaatgtagttctgaacaaaagattcttctggaggaccagtcaaaagaaaaaccagaaacttcgactgaaaatcatggagatgatcttgagaaactagaggcactggaatgtagcaataatgagaagttagaacctggctctgatgtggaggttaaagatgcagaactggataaagaaggtgcttctaaagtaaagaaataccgtaaattaattttagagcaggcaaaaacgacaagcctggaactggttccagaagagccatctgagcctgtgcctcctcttatagttgatcgtgagagattgaagaaattgcttgatttgttggtggataaaagcaacaatctggcagttgatcagcttgagagattatattctcttcttagtcagtgtatctaccgtcatcgtaaagattatgacaaatcacaacttgtagaggagatggaaagaacagttcatatgtttgagacattcctatga

SEQ ID NO: 211 - DNA, 2049 bp, Homo sapiens;
atggcaagtccagatagaagtaaacggaagatattaaaagccaaaaagacaatgcccctaagttgccggaagcaagtagagatgctgaataagtcaaggaatgttgaagcgctgaaaacagcaattgggagtaatgttccaagcggtaatcagagtttcagtcctagtgtcataactaggacgactgaaataaccaaatgtagcccttctgaaaatggtgcatcctcattggactctaataaaaattcaatatcagagaaaagtaaagtattctctcagaattgcataaaaccagtagaagaaattgttcattcagaaacaaaattggaacaagttgtttgttcgtaccaaaagccaagtagaacaacagaatcccccagcagagtcttcacagaagaggcaaaagattcactgaacacttctgaaaacgattctgagcatcagacaaatgtaacaagatccctttttgagcatgagggggcttgtagtctaaagtccagttgctgtccacccagtgtattgagtggtgttgttcagatgccagagtctacagtaaccagtaccgtgggtgacaagaaaactgaccagatggttttccatttagaaacaaactccaattcagaatcacatgataaaaggcaaagtgacaacattttatgttcagaagactcaggttttgtgcctgttgagaaaacacctaatttggtgaattcagtcacttctaacaactgtgctgatgacattttgaaaactgatgagtgtagtagaaccagtatttcaaattgtgaaagtgcagactcaacatggcagtcatcacttgacactaataacaacagccattatcaaaagaagaggatgttttcagaaaacgaggaaaatgttaaacgcatgaaaacttcagagcaaattaatgaaaatatttgtgtaagtttggaaaggcaaacagcattcctggaacaggtcagacatttgattcagcaggagatctatagcataaattatgaactatttgataagaaactgaaagaattgaaccaacgcattgggaagacagagtgcagaaataagcatgaaggaatagctgataaacttttggcaaaaatagcaaaacttcaaagacgtattaaaacagtattattatttcaaaggaattgtttgaaaccaaacatgttatccagtaatggagcctctaaggttgcaaattcagaggctatgattttggataagaatcttgagtcagttaatagtccaattgaaaagtcttctgtgaattatgagccttctaacccttccgaaaaaggaagtaaaaaaattaatttgtcatcagatcaaaataagtctgtttctgaaagtaacaatgatgatgttatgttgatttctgtggaaagtcctaatttgacaactccaattacatcaaatccaacagataccagaaaaattacatcaggaaattctagcaattctcccaatgctgaagttatggctgtacagaagaaacttgattctataattgatttgacaaaagaaggcctatccaactgcaatacagaaagtccagtatcccccctggagtcacattcgaaagctgcttcaaactcaaaggaaacaaccccattggcacaaaatgcagtccaggttcctgagtcctttgagcacctgccacctctcccagaaccaccagcaccactacctgaattagtagacaaaacccgagacacacttcctccccagaagcctgagctcaaagtgaaacgggttttcagacccaatggcattgccctgacttggaatataaccaaaatcaatcccaagtgtgctcctgtagaaagctaccacctcttcctgtgtcatgagaactctaataataagttgatttggaagaagattggagaaattaaagctttaccactccccatggcctgtactttatctcagtttttagcttccaacagatactattttactgtccaatcaaaagatatttttggacgatatggaccattctgtgatataaaatctatccctgggttttctgaaaatcttacgtaa

SEQ ID NO: 212 - DNA, 9171 bp, Homo sapiens;
atgagtctagtacttaatgatctgcttatctgctgccgtcaactagaacatgatagagctacagaacgaaagaaagaagttgagaaatttaagcgcctgattcgagatcctgaaacaattaaacatctagatcggcattcagattccaaacaaggaaaatatttgaattgggatgctgtttttagatttttacagaaatatattcagaaagaaacagaatgtctgagaatagcaaaaccaaatgtatcagcctcaacacaagcctccaggcagaaaaagatgcaggaaatcagtagtttggtcaaatacttcatcaaatgtgcaaacagaagagcacctaggctaaaatgtcaagaactcttaaattatatcatggatacagtgaaagattcatctaatggtgctatttacggagctgattgtagcaacatactactcaaagacattctttctgtgagaaaatactggtgtgaaatatctcagcaacagtggttagaattgttctctgtgtacttcaggctctatctgaaaccttcacaagatgttcatagagttttagtggctagaataattcatgctgttaccaaaggatgctgttctcagactgacggattaaattccaaatttttggactttttttccaaggctattcagtgtgcgagacaagaaaagagctcttcaggtctaaatcatatcttagcagctcttactatcttcctcaagactttggctgtcaactttcgaattcgagtgtgtgaattaggagatgaaattcttcccactttgctttatatttggactcaacataggcttaatgattctttaaaagaagtcattattgaattatttcaactgcaaatttatatccatcatccgaaaggagccaaaacccaagaaaaaggtgcttatgaatcaacaaaatggagaagtattttatacaacttatatgatctgctagtgaatgagataagtcatataggaagtagaggaaagtattcttcaggatttcgtaatattgccgtcaaagaaaatttgattgaattgatggcagatatctgtcaccaggtttttaatgaagataccagatccttggagatttctcaatcttacactactacacaaagagaatctagtgattacagtgtcccttgcaaaaggaagaaaatagaactaggctgggaagtaataaaagatcaccttcagaagtcacagaatgattttgatcttgtgccttggctacagattgcaacccaattaatatcaaagtatcctgcaagtttacctaactgtgagctgtctccattactgatgatactatctcagcttctaccccaacagcgacatggggaacgtacaccatatgtgttacgatgccttacggaagttgcattgtgtcaagacaagaggtcaaacctagaaagctcacaaaagtcagatttattaaaactctggaataaaatttggtgtattacctttcgtggtataagttctgagcaaatacaagctgaaaactttggcttacttggagccataattcagggtagtttagttgaggttgacagagaattctggaagttatttactgggtcagcctgcagaccttcatgtcctgcagtatgctgtttgactttggcactgaccaccagtatagttccaggaacggtaaaaatgggaatagagcaaaatatgtgtgaagtaaatagaagcttttctttaaaggaatcaataatgaaatggctcttattctatcagttagagggtgacttagaaaatagcacagaagtgcctccaattcttcacagtaattttcctcatcttgtactggagaaaattcttgtgagtctcactatgaaaaactgtaaagctgcaatgaattttttccaaagcgtgccagaatgtgaacaccaccaaaaagataaagaagaactttcattctcagaagtagaagaactatttcttcagacaacttttgacaagatggactttttaaccattgtgagagaatgtggtatagaaaagcaccagtccagtattggcttctctgtccaccagaatctcaaggaatcactggatcgctgtcttctgggattatcagaacagcttctgaataattactcatctgagattacaaattcagaaactcttgtccggtgttcacgtcttttggtgggtgtccttggctgctactgttacatgggtgtaatagctgaagaggaagcatataagtcagaattattccagaaagccaagtctctaatgcaatgtgcaggagaaagtatcactctgtttaaaaataagacaaatgaggaattcagaattggttccttgagaaatatgatgcagctatgtacacgttgcttgagcaactgtaccaagaagagtccaaataagattgcatctggctttttcctgcgattgttaacatcaaagctaatgaatgacattgcagatatttgtaaaagtttagcatccttcatcaaaaagccatttgaccgtggagaagtagaatcaatggaagatgatactaatggaaatctaatggaggtggaggatcagtcatccatgaatctatttaacgattaccctgatagtagtgttagtgatgcaaacgaacctggagagagccaaagtaccataggtgccattaatcctttagctgaagaatatctgtcaaagcaagatctacttttcttagacatgctcaagttcttgtgtttgtgtgtaactactgctcagaccaatactgtgtcctttagggcagctgatattcggaggaaattgttaatgttaattgattctagcacgctagaacctaccaaatccctccacctgcatatgtatctaatgcttttaaaggagcttcctggagaagagtaccccttgccaatggaagatgttcttgaacttctgaaaccactatccaatgtgtgttctttgtatcgtcgtgaccaagatgtttgtaaaactattttaaaccatgtccttcatgtagtgaaaaacctaggtcaaagcaatatggactctgagaacacaagggatgctcaaggacagtttcttacagtaattggagcattttggcatctaacaaaggagaggaaatatatattctctgtaagaatggccctagtaaattgccttaaaactttgcttgaggctgatccttattcaaaatgggccattcttaatgtaatgggaaaagactttcctgtaaatgaagtatttacacaatttcttgctgacaatcatcaccaagttcgcatgttggctgcagagtcaatcaatagattgttccaggacacgaagggagattcttccaggttactgaaagcacttcctttgaagcttcagcaaacagcttttgaaaatgcatacttgaaagctcaggaaggaatgagagaaatgtcccatagtgctgagaaccctgaaactttggatgaaatttataatagaaaatctgttttactgacgttgatagctgtggttttatcctgtagccctatctgcgaaaaacaggctttgtttgccctgtgtaaatctgtgaaagagaatggattagaacctcaccttgtgaaaaaggttttagagaaagtttctgaaacttttggatatagacgtttagaagactttatggcatctcatttagattatctggttttggaatggctaaatcttcaagatactgaatacaacttatcttcttttccttttattttattaaactacacaaatattgaggatttctatagatcttgttataaggttttgattccacatctggtgattagaagtcattttgatgaggtgaagtccattgctaatcagattcaagaggactggaaaagtcttctaacagactgctttccaaagattcttgtaaatattcttccttattttgcctatgagggtaccagagacagtgggatggcacagcaaagagagactgctaccaaggtctatgatatgcttaaaagtgaaaacttattgggaaaacagattgatcacttattcattagtaatttaccagagattgtggtggagttattgatgacgttacatgagccagcaaattctagtgccagtcagagcactgacctctgtgacttttcaggggatttggatcctgctcctaatccacctcattttccatcgcatgtgattaaagcaacatttgcctatatcagcaattgtcataaaaccaagttaaaaagcattttagaaattctttccaaaagccctgattcctatcagaaaattcttcttgccatatgtgagcaagcagctgaaacaaataatgtttataagaagcacagaattcttaaaatatatcacctgtttgttagtttattactgaaagatataaaaagtggcttaggaggagcttgggcctttgttcttcgagacgttatttatactttgattcactatatcaaccaaaggccttcttgtatcatggatgtgtcattacgtagcttctccctttgttgtgacttattaagtcaggtttgccagacagccgtgacttactgtaaggatgctctagaaaaccatcttcatgttattgttggtacacttataccccttgtgtatgagcaggtggaggttcagaaacaggtattggacttgttgaaatacttagtgatagataacaaggataatgaaaacctctatatcacgattaagcttttagatccttttcctgaccatgttgtttttaaggatttgcgtattactcagcaaaaaatcaaatacagtagaggacccttttcactcttggaggaaattaaccattttctctcagtaagtgtttatgatgcacttccattgacaagacttgaaggactaaaggatcttcgaagacaactggaactacataaagatcagatggtggacattatgagagcttctcaggataatccgcaagatgggattatggtgaaactagttgtcaatttgttgcagttatccaagatggcaataaaccacactggtgaaaaagaagttctagaggctgttggaagctgcttgggagaagtgggtcctatagatttctctaccatagctatacaacatagtaaagatgcatcttataccaaggcccttaagttatttgaagataaagaacttcagtggaccttcataatgctgacctacctgaataacacactggtagaagattgtgtcaaagttcgatcagcagctgttacctgtttgaaaaacattttagccacaaagactggacatagtttctgggagatttataagatgacaacagatccaatgctggcctatctacagccttttagaacatcaagaaaaaagtttttagaagtacccagatttgacaaagaaaacccttttgaaggcctggatgatataaatctgtggattcctctaagtgaaaatcatgacatttggataaagacactgacttgtgcttttttggacagtggaggcacaaaatgtgaaattcttcaattattaaagccaatgtgtgaagtgaaaactgacttttgtcagactgtacttccatacttgattcatgatattttactccaagatacaaatgaatcatggagaaatctgctttctacacatgttcagggatttttcaccagctgtcttcgacacttctcgcaaacgagccgatccacaacccctgcaaacttggattcagagtcagagcactttttccgatgctgtttggataaaaaatcacaaagaacaatgcttgctgttgtggactacatgagaagacaaaagagaccttcttcaggaacaatttttaatgatgctttctggctggatttaaattatctagaagttgccaaggtagctcagtcttgtgctgctcactttacagctttactctatgcagaaatctatgcagataagaaaagtatggatgatcaagagaaaagaagtcttgcatttgaagaaggaagccagagtacaactatttctagcttgagtgaaaaaagtaaagaagaaactggaataagtttacaggatcttctcttagaaatctacagaagtataggggagccagatagtttgtatggctgtggtggagggaagatgttacaacccattactagactacgaacatatgaacacgaagcaatgtggggcaaagccctagtaacatatgacctcgaaacagcaatcccctcatcaacacgccaggcaggaatcattcaggccttgcagaatttgggactctgccatattctttccgtctatttaaaaggattggattatgaaaataaagactggtgtcctgaactagaagaacttcattaccaagcagcatggaggaatatgcagtgggaccattgcacttccgtcagcaaagaagtagaaggaaccagttaccatgaatcattgtacaatgctctacaatctctaagagacagagaattctctacattttatgaaagtctcaaatatgccagagtaaaagaagtggaagagatgtgtaagcgcagccttgagtctgtgtattcgctctatcccacacttagcaggttgcaggccattggagagctggaaagcattggggagcttttctcaagatcagtcacacatagacaactctctgaagtatatattaagtggcagaaacactcccagcttctcaaggacagtgattttagttttcaggagcctatcatggctctacgcacagtcattttggagatcctgatggaaaaggaaatggacaactcacaaagagaatgtattaaggacattctcaccaaacaccttgtagaactctctatactggccagaactttcaagaacactcagctccctgaaagggcaatatttcaaattaaacagtacaattcagttagctgtggagtctctgagtggcagctggaagaagcacaagtattctgggcaaaaaaggagcagagtcttgccctgagtattctcaagcaaatgatcaagaagttggatgccagctgtgcagcgaacaatcccagcctaaaacttacatacacagaatgtctgagggtttgtggcaactggttagcagaaacgtgcttagaaaatcctgcggtcatcatgcagacctatctagaaaaggcagtagaagttgctggaaattatgatggagaaagtagtgatgagctaagaaatggaaaaatgaaggcatttctctcattagcccggttttcagatactcaataccaaagaattgaaaactacatgaaatcatcggaatttgaaaacaagcaagctctcctgaaaagagccaaagaggaagtaggtctccttagggaacataaaattcagacaaacagatacacagtaaaggttcagcgagagctggagttggatgaattagccctgcgtgcactgaaagaggatcgtaaacgcttcttatgtaaagcagttgaaaattatatcaactgcttattaagtggagaagaacatgatatgtgggtattccgactttgttccctctggcttgaaaattctggagtttctgaagtcaatggcatgatgaagagagacggaatgaagattccaacatataaatttttgcctcttatgtaccaattggctgctagaatggggaccaagatgatgggaggcctaggatttcatgaagtcctcaataatctaatctctagaatttcaatggatcacccccatcacactttgtttattatactggccttagcaaatgcaaacagagatgaatttctgactaaaccagaggtagccagaagaagcagaataactaaaaatgtgcctaaacaaagctctcagcttgatgaggatcgaacagaggctgcaaatagaataatatgtactatcagaagtaggagacctcagatggtcagaagtgttgaggcactttgtgatgcttatattatattagcaaacttagatgccactcagtggaagactcagagaaaaggcataaatattccagcagaccagccaattactaaacttaagaatttagaagatgttgttgtccctactatggaaattaaggtggaccacacaggagaatatggaaatctggtgactatacagtcatttaaagcagaatttcgcttagcaggaggtgtaaatttaccaaaaataatagattgtgtaggttccgatggcaaggagaggagacagcttgttaagggccgtgatgacctgagacaagatgctgtcatgcaacaggtcttccagatgtgtaatacattactgcagagaaacacggaaactaggaagaggaaattaactatctgtacttataaggtggttcccctctctcagcgaagtggtgttcttgaatggtgcacaggaactgtccccattggtgaatttcttgttaacaatgaagatggtgctcataaaagatacaggccaaatgatttcagtgcctttcagtgccaaaagaaaatgatggaggtgcaaaaaaagtcttttgaagagaaatatgaagtcttcatggatgtttgccaaaattttcaaccagttttccgttacttctgcatggaaaaattcttggatccagctatttggtttgagaagcgattggcttatacgcgcagtgtagctacttcttctattgttggttacatacttggacttggtgatagacatgtacagaatatcttgataaatgagcagtcagcagaacttgtacatatagatctaggtgttgcttttgaacagggcaaaatccttcctactcctgagacagttccttttagactcaccagagatattgtggatggcatgggcattacgggtgttgaaggtgtcttcagaagatgctgtgagaaaaccatggaagtgatgagaaactctcaggaaactctgttaaccattgtagaggtccttctatatgatccactctttgactggaccatgaatcctttgaaagctttgtatttacagcagaggccggaagatgaaactgagcttcaccctactctgaatgcagatgaccaagaatgcaaacgaaatctcagtgatattgaccagagtttcaacaaagtagctgaacgtgtcttaatgagactacaagagaaactgaaaggagtggaagaaggcactgtgctcagtgttggtggacaagtgaatttgctcatacagcaggccatagaccccaaaaatctcagccgacttttcccaggatggaaagcttgggtgtga

SEQ ID NO: 213 - DNA, 1536 bp, Homo sapiens;
atggcgctgcgggcgatgcgggggattgtcaacggggccgcacccgagctacccgtgcccaccggtgggccggcggtgggagctcgggagcaggcgctggcagtcagtcggaactacctctcccagcctcgcctcacatacaagacagtatctggagtcaatggtccactagtgatcttagatcatgttaagtttcccaggtatgctgaaattgtccatttgaccttaccggatggcacaaagagaagtgggcaagttctggaagttagtggttccaaggcagtagttcaggtatttgaagggacttcaggtatagatgctaagaaaacgtcctgtgagtttactggggatattctccgaacaccggtgtctgaggatatgcttggtcgggtattcaatggatcgggaaaacccattgacagaggtcctgttgtactggccgaagacttccttgatatcatgggtcagccaatcaaccctcaatgtcgaatctacccagaggaaatgattcagactggcatttcggccatcgatgggatgaacagtattgctagggggcagaaaattcctatcttctctgctgctgggctaccacacaatgagattgcagctcagatctgtcgccaggctggtttggtaaagaaatccaaagatgtagtagactacagtgaggaaaattttgcaattgtatttgctgctatgggtgtaaacatggaaactgcccggttcttcaaatctgactttgaagaaaatggctcaatggacaatgtctgcctctttttgaacttggctaatgacccaaccattgagcgaattatcactcctcgcctggctctaaccacagctgaatttctggcgtaccaatgtgagaaacatgtattggttattctaacagacatgagttcttatgctgaagcacttcgagaggtttcagcagccagggaagaggtacctggtcgacgaggttttccaggttacatgtatacagatttagccacgatatatgaacgcgctgggcgagtggaagggagaaacggctcgattactcaaatccctattctaaccatgcctaatgatgatatcactcaccccatcccagacttgactggctacattacagaggggcagatctatgtggacagacagctgcacaacagacagatttatccacctatcaatgtgctgccctcactatcacggttaatgaagtctgctattggagaagggatgaccaggaaggatcatgccgatgtatctaaccagctatatgcgtgctatgctattggaaaggatgtgcaagccatgaaagctgtcgttggagaagaagcccttacctcagatgatcttctctacttggaatttctgcagaagtttgagaggaacttcattgctcagggtccttacgaaaatcgcactgtctttgagactttggacattggctggcagctactccgaatcttccccaaagaaatgctgaagagaatccctcagagcaccctcagcgaattttaccctcgagactctgcaaagcattag

SEQ ID NO: 214 - DNA, 2211 bp, Homo sapiens;
atgtctctgagtgagaactcggtttttgcctatgaatcttctgtgcatagcaccaatgttttactcagccttaatgaccagcggaagaaagatgtgctgtgcgatgtcaccatctttgtggagggacagcggttccgcgctcaccggtccgtgctggcggcatgcagcagttacttccactcaagaatcgtaggccaggctgatggagagctgaacattactcttccagaagaggtgacagttaaaggatttgaacctttaattcagtttgcctacactgctaaactgattttaagtaaagagaatgtggatgaagtgtgcaaatgtgtggagtttttaagtgtacataatattgaggaatcctgctttcagtttctgaaatttaagtttttggactccactgcagaccagcaagaatgcccaagaaaaaaatgcttttcatcacactgtcagaaaacagaccttaaactttcacttttggaccagagggatctagaaactgatgaagtggaggaatttctggaaaataaaaatgttcagactcctcagtgtaaactccgcaggtatcaaggaaatgcaaaagcctcacctcctctacaagacagtgccagtcagacatatgagtccatgtgcttagagaaggatgctgctctggccttgccttctttatgccccaaatacagaaaattccaaaaagcatttggaactgacagagtccgtactggggaatctagtgtcaaagacattcatgcttctgttcagccaaatgaaaggtctgaaaatgaatgcctgggaggagtcccggagtgtagagatttgcaggtgatgttaaaatgtgacgaaagtaaattagcaatggaacctgaagaaacgaagaaagatcctgcttctcagtgcccaactgaaaaatcagaagtgactcctttcccccacaattcttccatagaccctcatggactttattctttgtctcttttacacacatatgaccaatatggtgacttgaattttgctggtatgcaaaacacaacagtgttaacagaaaagcctttgtcaggtacagacgtccaagaaaaaacatttggtgaaagtcaggatttacctttgaaatccgacttgggcaccagggaagatagtagtgttgcatctagtgataggagtagtgtggagcgagaagtggcagaacacctagcaaaaggcttctggagtgacatttgcagcacggacactccttgccaaatgcagttatcacctgctgtggccaaagatggctcagaacagatctcacagaaacggtctgagtgtccgtggttaggtatcaggattagtgagagcccagaaccaggtcaaaggactttcacaacattaagttctgtcaactgcccttttataagtactctgagtactgaaggctgttcaagcaatttggaaattggaaacgatgattatgtttcagaaccccagcaagaaccttgcccatatgcttgtgtcattagcttgggagacgactctgagacggacaccgaaggagacagtgaatcctgttcagccagagaacaagaatgtgaggtaaaactgccattcaatgcacaacggataatttcactgtctcgaaatgattttcagtccttgttgaaaatgcacaagcttactccagaacagctggattgtatccatgatattcgaagaagaagtaaaaacagaattgctgcacagcgctgtcgcaagagaaaacttgactgtatacagaatcttgaatcagaaattgagaagctgcaaagtgaaaaggagagcttgttgaaggaaagagatcacattttgtcaactctgggtgagacaaagcagaacctaactggactttgccagaaagtttgtaaagaagcagctctgagtcaagaacaaatacagatactcgccaagtactcagctgcagattgcccactttcatttttaatttctgaaaaagataaaagtactcctgatggtgaactggcgttaccatcaattttcagtttatctgaccggcctccagcagtgctgcctccctgtgccagaggaaacagtgagcctggctacgcgcgagggcaggagtcccagcagatgtccacagccacctctgagcaagctgggcctgcggaacagtgtcgtcagagtggtgggatctcagatttctgtcagcagatgactgataaatgtactactgatgagtaa

SEQ ID NO: 215 - DNA, 1410 bp, Homo sapiens;
atgatgtcggaacacgacctggccgatgtggttcagattgcagtggaagacctgagccctgaccacccagttgttttggagaatcatgtagtgacagatgaagacgaacctgctttgaaacgccagcgactagaaatcaattgccaggatccatctataaagtcattcctgtattccatcaaccagacaatctgcttgcggttggatagcattgaagccaaattgcaagccctggaggctacttgtaaatccttagaagaaaagctggatctggtcacgaacaagcagcacagccccatccaggtccccatggtggccggctcccctctcggggcaacccagacgtgcaacaaagtgcgatgcgctgtgcctgggcgtcggcagaacaccattgtggtgaaggtgccgggccaagaagacagccaccacgaggacggggagagcggctcggaggccagcgactctgtgtccagctgtgggcaggcgggcagtcagagcatcgggagcaacgtcacgctcatcaccctgaactcggaagaggactaccccaatggcacctggctgggcgacgagaacaaccccgagatgcgggtacgctgcgccatcatcccctccgacatgctgcacatcagcaccaactgccgcacggccgagaagatggcgctcacgctgctggactacctcttccaccgcgaggtgcaggctgtgtccaacctctcggggcagggcaagcacgggaagaagcagctggacccgctcaccatctacggcatccggtgtcaccttttctataaatttggcatcacagaatccgactggtaccgaatcaagcagagcatcgactccaagtgccgcacggcgtggcggcgcaagcagcggggccagagcctggcggtcaagagcttctcgcggagaacgcccaactcgtcctcctactgcccttcagagccgatgatgagcaccccacctcctgccagcgagctcccgcagccacagccgcagccgcaggccctgcactacgcgctggccaacgcacagcaggtgcagatccaccagatcggagaagacggacaggtgcaagtaatcccacagggacacctccacatcgcccaggtgccgcagggggagcaagtccagatcacgcaggacagcgagggcaacctccagatccatcacgtggggcaggacggtcaggtgctgcagggtgcacagctgatcgccgtggcctcctcggaccccgcggcggcgggcgtggatgggtcgccactccagggcagcgacatccaggttcagtacgtgcagctggcgccagtgagtgaccacacggccggggcacagacggccgaagccctgcagcccacgctacagccggagatgcagctcgagcacggggccatccagattcagtga

SEQ ID NO: 216 - DNA, 6507 bp, Homo sapiens;
atggagtctggagaacggttaccatcctcagcagcctcctctactacaccaacttcatcttcgacaccttctgtggcttcagtagtttcaaaaggtggcctttccactggagttgcttcacttagctctacaatcaacccatgtggacatttattcagaacagctggggatcaaccgtttaacctgtccacagtgtcgagtgccttcccaatggtcagccacccagtctttggtctacattcagccagctcagggcattcagaatttggtggtttggggacacttggtacacccacagccttagccgcacatccccaactagcatcttttccaggtgcagaatggtggcgaacaactgatgctcatactcgtacaggagcaaccttctttccaccattactgggaattccaccactatttgctcccccagcccagaatcatgattcttcttcattccattcaaggacttcgggaaaaagtaatcgaaatggtcccgaaaaaggtgtaaatgggtcaataaatggaagtaatacatcatctgtaattggtatcaacacatctgtactatccactactgcttcaagttccatgggacaaactaaaagtacaagctcaggtggaggaaatcgaaaatgtaatcaggaacaaagcaaaaaccagcctttggatgctagagttgacaaaatcaaagataagaaaccaaggaagaaagcaatggaaagttctagcaacagtgatagtgattcaggcacatcatcagacacctcaagtgaaggcattagtagcagtgattcagatgatctagaagaagatgaagaagaagaagatcaaagtattgaagaaagtgaagatgatgattctgattcagagagtgaagcacaacataaaagtaacaaccaggtgctattacatggtatttcagacccaaaagcagatggacagaaagcaactgaaaaagcccaggaaaaaagaatacaccagccattacctcttgcgtctgaatcccagactcactcattccaatcccagcagaagcagcctcaggttttgtcacagcagcttccatttattttccaaagctctcaggcaaaggaggaatctgtgaacaaacacaccagtgtaatacagtctacgggattggtgtccaatgtgaaacctttatctttggtaaatcaagccaaaaaggaaacttacatgaaactcatagttccttctcctgatgttcttaaagcagggaataaaaatacctctgaagaatctagtttattgaccagtgaattgagatccaaacgggaacaatataaacaggcattcccatcacagttaaagaaacaagagtcatcgaagagcctgaagaaggttattgcagctttgtcaaatccaaaagcaacctctagttcaccagcacatccaaaacaaacattagaaaacaaccacccaaatccattcttgacaaatgcacttttaggtaatcaccaaccaaatggagttattcaaagtgtcattcaagaagctcctctagcacttactaccaaaactaaaatgcagagcaagattaatgaaaacattgctgctgcaagtagcacccctttttcctcacctgtaaatctgagtacaagtgggagaagaacccctggcaatcagacacctgtaatgccctctgcctctcccatcctgcatagtcaagggaaggaaaaagcagttagcaataatgtaaacccagtaaaaacacagcatcactcccatcctgcaaaatctttagtggaacaattcagaggaacagattcagacattcccagtagtaaagattctgaagattcaaatgaggatgaagaggaagatgatgaagaagaagatgaggaagatgatgaagatgatgaatctgatgacagccaatcagaatcagatagtaattcagaatcagatacagaaggatcagaagaagaagatgatgatgataaagaccaagatgaatcagatagtgatactgaaggagagaaaacttcaatgaaactgaataaaacaacttcctctgtcaaaagcccttccatgagtctcacaggtcactcaacacctcgtaacctccacatagcaaaagccccaggctctgctcctgctgccttatgttctgaatcccagtcacctgcttttcttggtacatcttcttccacacttacttcaagcccacactctggcacttccaaaagaagaagagtaacagatgaacgtgaactgcgtattccattggaatatggctggcagagagagacaagaataagaaactttggagggcgccttcaaggagaagtagcatattatgctccatgtggaaagaaacttaggcagtaccctgaagtaataaagtatctcagcagaaatggaataatggatatctcaagggacaatttcagcttcagtgcaaaaataagagtgggtgacttctatgaagccagagatggaccgcagggaatgcagtggtgtcttttgaaagaagaggatgtcattcctcgtatcagggcaatggaaggtcgtagaggaagaccaccaaatccagatagacaacgagcaagagaggaatccaggatgagacgtcggaaaggtcgacctccaaatgttggcaatgctgaattcctagataacgcagatgcaaagttgctaagaaaactgcaagctcaagaaatagccaggcaagcagcacaaataaagcttttgagaaaacttcaaaagcaggaacaggctcgggttgctaaagaagccaaaaaacaacaagcaataatggctgctgaggagaagcggaagcaaaaagaacagataaagattatgaaacagcaggaaaaaattaagagaatacagcaaatcagaatggaaaaagaacttcgagctcagcaaattctagaggctaaaaagaaaaagaaggaagaagcggcaaatgccaaattattggaggccgagaaacgaataaaggaaaaagaaatgagaagacaacaagctgttcttctgaaacatcaggaacgagagcgaaggcgacaacacatgatgcttatgaaagctatggaagctcgtaaaaaagcagaagaaaaagagcggttgaaacaagaaaaacgtgatgagaaaagattaaataaagagcgtaaactagagcagcgaagattagaattagaaatggcaaaggaactaaagaagcctaatgaagacatgtgcttagcagaccaaaagcctttgccagagttgcctcgtattccaggacttgttctctctggaagtacattttcagactgtctcatggtggtgcagttcttacgaaactttggtaaagttttgggctttgatgtgaatattgatgttccaaacctgagtgttcttcaagagggattgctaaatataggggacagcatgggtgaagtacaagacttgcttgtgaggctcctctcagctgctgtatgtgatccaggtctaataacaggatacaaggctaaaacagctcttggagaacatttgctgaatgttggtgtgaatcgagacaatgtttccgagattttacagatatttatggaagcccactgtggacaaactgagcttactgaaagtctgaagaccaaagcttttcaggctcacactccagcacagaaagcttcagtcctggctttcctgatcaatgaactggcatgcagcaagagtgtggtcagtgaaatcgacaagaacattgattatatgtcaaacttgaggagagataaatgggtggtagaaggtaaactccgcaagctcagaatcattcatgctaagaaaacaggcaaaagagacacttcaggtggcattgatctgggagaagagcagcatcccttgggcacacccactccaggacgcaagcgaagaaggaagggaggagacagtgattatgacgatgatgatgacgatgacagtgatgaccaaggggatgaagatgatgaggatgaagaagataaagaagacaaaaaaggaaaaaagactgatatctgtgaagatgaggatgaaggtgaccaagcagcaagtgttgaagagctggaaaaacagattgaaaaactgagtaaacaacagagtcagtacagaaggaagctctttgatgcgtctcactcattgcgttcagtgatgtttggccaagatcgttacagacgccggtactggattcttccccaatgtggggggatttttgtagaaggcatggagagtggtgaaggactagaagaaattgcaaaagaaagagaaaaactgaaaaaggcagaaagtgtccagatcaaagaagaaatgtttgagacttctggggacagtttaaattgttcaaatacagatcactgtgaacaaaaggaagatcttaaagaaaaagataacacaaatctattccttcagaaacctggctctttttccaaattaagcaagcttttggaagtagctaagatgcctcctgagtcagaggttatgacccccaaaccaaatgctggtgcaaatgggtgcacgttgtcttatcagaacagtggaaaacattcactgggcagcgttcagtcaacagcaacgcaaagcaatgtggaaaaggcagactctaataatctgtttaatactggttcaagtggtccagggaagttctacagtcctctccccaatgaccagttactaaaaacgctgactgaaaagaatagacaatggtttagtcttttgccacgaacaccctgtgatgacacttcacttactcatgccgatatgtcaactgcttctttggtgactcctcagtctcagccaccatctaagtcaccttcacctaccccagctcctcttggatcttctgctcagaatcctgttggcttaaatccatttgctttatcacctcttcaggtgaaaggtggagtatctatgatgggacttcagttttgtggatggcccactggtgtggttacttctaatattccatttacatcatctgtacctagtctaggatcggggttagggttatcagaaggaaatggtaattcattcttgacttccaatgttgcttcaagtaaaagtgaatctccagtaccacagaatgaaaaggccacttcagctcaacctgcagctgttgaagtagcaaaaccagtagattttcctagtccaaaacctattccagaagaaatgcagtttggttggtggagaattattgacccagaggacctaaaagctttgctcaaagtgctgcatctcagaggaataagagaaaaggcattacaaaaacaaattcagaaacatttggattatattactcaagcctgcctcaagaataaggatgttgctattattgaactgaatgaaaatgaagaaaaccaagtaactcgagatattgtggagaactggtcagtagaagaacaagcaatggaaatggatttgagtgtccttcaacaggtagaagatctagaaaggagagttgcatcagcaagtttgcaagtgaagggttggatgtgtccagagcctgcatcagaaagggaggacttggtatattttgaacataaatcatttactaaattgtgcaaggagcatgatggagaatttactggcgaagacgaaagcagtgcacatgcactagaacggaagagtgacaaccccctagatatagctgtaaccaggctggctgatttggagcggaacattgaaagaagaattgaagaggatattgctccagggctcagggtatggagaagggcattatcagaagctcgcagtgctgcacaggtagctctgtgcattcagcaattacagaaatcaatagcatgggaaaaatcaattatgaaagtttactgccaaatctgtcgaaagggagataatgaagaactgcttcttctttgtgatggctgtgacaaaggctgtcatacctactgccatagacccaagattacaacaatcccagatggagactggttttgtccagcttgcattgctaaggcaagtggtcaaactctaaaaatcaaaaaacttcatgtcaaaggaaaaaagactaatgagtcaaagaaaggcaagaaggtaactttaacaggagatactgaagatgaagactctgcatctacaagtagttcactaaaaagaggaaacaaagacctcaagaaaagaaaaatggaggaaaacacttctattaacttgtcaaaacaagaaagttttacttcagttaagaaacctaaaagagatgactccaaggacctagctctttgcagtatgattctgactgaaatggaaactcatgaggatgcatggccttttctacttcctgtaaacttgaaacttgttcctggttataagaaagttattaagaagcctatggatttttccacaattagagagaaactaagtagtggacagtatccaaaccttgaaacctttgctctagatgtcaggcttgtttttgacaactgtgaaacatttaatgaagatgattctgatataggcagagctggccacaatatgaggaagtattttgaaaaaaagtggacagatactttcaaagtgagctga

SEQ ID NO: 217 - DNA, 720 bp, Homo sapiens;
atggcgcacgctgggagaacagggtacgataaccgggagatagtgatgaagtacatccattataagctgtcgcagaggggctacgagtgggatgcgggagatgtgggcgccgcgcccccgggggccgcccccgcaccgggcatcttctcctcccagcccgggcacacgccccatccagccgcatcccgggacccggtcgccaggacctcgccgctgcagaccccggctgcccccggcgccgccgcggggcctgcgctcagcccggtgccacctgtggtccacctgaccctccgccaggccggcgacgacttctcccgccgctaccgccgcgacttcgccgagatgtccagccagctgcacctgacgcccttcaccgcgcggggacgctttgccacggtggtggaggagctcttcagggacggggtgaactgggggaggattgtggccttctttgagttcggtggggtcatgtgtgtggagagcgtcaaccgggagatgtcgcccctggtggacaacatcgccctgtggatgactgagtacctgaaccggcacctgcacacctggatccaggataacggaggctgggatgcctttgtggaactgtacggccccagcatgcggcctctgtttgatttctcctggctgtctctgaagactctgctcagtttggccctggtgggagcttgcatcaccctgggtgcctatctgggccacaagtga

SEQ ID NO: 218 - DNA, 363 bp, Homo sapiens;
atggagtccaaagaggaactagcggcaaacaatctcaacggggaaaatgcccaacaagaaaacgaaggaggggagcaggcccccacgcagaatgaagaagaatcccgccatttgggagggggtgaaggccagaagcctggaggaaatatcaggcgggggcgagttaggcgacttgtccctaattttcgatgggccatacctaataggcatattgagcacaatgaagcgagagatgatgtagaaaggtttgtagggcagatgatggaaatcaagagaaagactagggaacagcagatgaggcactatatgcgcttccaaactcctgaacctgacaaccattatgacttttgcctcataccttga

SEQ ID NO: 219 - DNA, 1989 bp, Homo sapiens;
atgaagaagttctctcggatgcccaagtcggagggcggcagcggcggcggagcggcgggtggcggggctggcggggccggggccggggccggctgcggctccggcggctcgtccgtgggggtccgggtgttcgcggtcggccgccaccaggtcaccctggaagagtcgctggccgaaggtggattctccacagttttcctcgtgcgtactcacggtggaatccgatgtgcattgaagcgaatgtatgtcaataacatgccagacctcaatgtttgtaaaagggaaattacaattatgaaagagctatctggtcacaaaaatattgtgggctatttggactgtgctgttaattcaattagtgataatgtatgggaagtccttatcttaatggaatattgtcgagctggacaggtagtgaatcaaatgaataagaagctacagacgggttttacagaaccagaagtgttacagatattctgtgatacctgtgaagctgttgcaaggttgcatcagtgtaagactccaataattcaccgggatctgaaggtagaaaatattttgttgaatgatggtgggaactatgtactttgtgactttggcagtgccactaataaatttcttaatcctcaaaaagatggagttaatgtagtagaagaagaaattaaaaagtatacaactctgtcatacagagcccctgaaatgatcaacctttatggagggaaacccatcaccaccaaggctgatatctgggcactgggatgtctactctataaactttgtttcttcactcttccttttggtgagagtcaggttgctatctgtgatggcaacttcaccatcccagacaattctcgttactcccgtaacatacattgcttaataaggttcatgcttgaaccagatccggaacatagacctgatatatttcaagtgtcatattttgcatttaaatttgccaaaaaggattgtccagtctccaacatcaataattcttctattccttcagctcttcctgaaccgatgactgctagtgaagcagctgctaggaaaagccaaataaaagccagaataacagataccattggaccaacagaaacctcaattgcaccaagacaaagaccaaaggccaactctgctactactgccactcccagtgtgctgaccattcaaagttcagcaacacctgttaaagtccttgctcctggtgaattcggtaaccatagaccaaaaggggcactaagacctggaaatggccctgaaattttattgggtcagggacctcctcagcagccgccacagcagcatagagtactccagcaactacagcagggagattggagattacagcaactccatttacagcatcgtcatcctcaccagcagcagcagcagcagcagcagcaacagcaacagcagcagcagcaacagcaacagcagcagcagcagcagcagcagcagcaccaccaccaccaccaccaccacctacttcaagatgcttatatgcagcagtatcaacatgcaacacagcagcaacagatgcttcaacaacaatttttaatgcattcggtatatcaaccacaaccttctgcatcacagtatcctacaatgatgccgcagtatcagcaggctttctttcaacagcagatgctagctcaacatcagccgtctcaacaacaggcatcacctgaatatcttacctcccctcaagagttctcaccagccttagtttcctacacttcatcacttccagctcaggttggaaccataatggactcctcctatagtgccaataggtcagttgctgataaagaggccattgcaaatttcacaaatcagaagaacatcagcaatccacctgatatgtcagggtggaatccttttggagaggataatttctctaagttaacagaagaggaactattggacagagaatttgaccttctaagatcaagtaagggacacttgaaggcttattttgcttcacagtaa

SEQ ID NO: 220 - DNA, 3177 bp, Homo sapiens;
atgaggaggaaaggacgatgtcatcgaggctctgcagcgaggcatccttcttccccatgcagtgttaaacactcccctacgcgagaaacgctgacctacgctcaagctcaaaggatggtagagatagaaattgaagggcgcttgcacaggatcagtatttttgatcccctggagatcatattggaagatgacctcactgctcaagagatgagtgagtgcaacagcaacaaggaaaacagcgagcggcctcctgtctgcttaagaactaagcgtcacaaaaacaacagagtcaaaaagaaaaacgaggccctccccagcgcccacggcacgccggcctcggccagtgccctcccggagcccaaggtgcgcatcgtggagtacagccctccgtccgcccccaggaggcctcctgtgtactacaagttcatcgagaagtcggccgaggaactggacaacgaggtggagtatgacatggacgaggaggactatgcctggctggagatcgtcaatgagaagcgcaagggcgactgcgtccccgccgtgtcgcagagcatgtttgagttcctgatggaccgcttcgagaaggagtcgcactgcgagaaccagaagcagggcgagcagcagtctctgatcgacgaggacgccgtgtgctgcatctgcatggacggggagtgtcagaacagcaacgtgatcctcttctgcgacatgtgcaacctggccgtgcaccaggagtgctacggggtgccctacatccccgagggccagtggctctgccgccactgcctgcagtcgcgggcccggcccgccgactgtgtgctgtgccccaacaagggtggtgccttcaaaaagacagatgacgaccgctggggtcacgtggtgtgtgccctgtggatcccagaggtcggctttgccaacacggtgttcatcgagcccatcgatggggtgaggaacatccctccagcccggtggaaactgacatgctacctctgtaagcagaagggcgtgggtgcctgcatccagtgccacaaagcaaactgctacacagcattccatgtgacgtgtgcccagaaggctggcctgtacatgaaaatggagcccgtgaaggaactgactggcggtggcaccaccttctccgtcagaaagaccgcttactgtgatgtccacacgcctccaggctgcacccggaggcctctgaatatttacggggatgtcgaaatgaaaaatggcgtctgtcgaaaagagagctcggttaaaacggtcaggtccacatccaaggtcaggaagaaggcaaaaaaggctaagaaagctctggctgagccctgcgcggtcctgccgaccgtgtgcgctccttatattcccccgcagaggttaaataggattgcgaatcaggtggccattcagcggaagaagcagtttgtggagcgagcccacagctactggctgctcaagcggctgtccaggaacggggcccccctgctgcggcggctgcagtccagcctgcagtctcagcgaagctcacagcagagagaaaatgatgaggagatgaaggctgccaaagagaagctgaagtactggcagcggctgcggcacgacctggagcgcgctcgcctgctgatcgagctgctgcgcaagcgggagaagctcaagcgtgagcaggtgaaggtggagcaggtcgccatggagctgcggctgaccccgctgacggtgctgctgcgctcagtgctggaccagctgcaagacaaggaccccgccaggatatttgcgcagcccgtgagtctgaaggaggtaccagattatttggatcacattaaacatcccatggactttgccacaatgaggaaacggttagaagctcaagggtataaaaacctccatgagtttgaggaggattttgatctcattatagataactgcatgaagtacaatgccagggacaccgtgttctatagagccgcggtgaggctgcgcgatcagggaggtgttgttctgaggcaggcccggcgcgaggtggacagcatcggcttggaagaggcctcggggatgcacctgcctgagcggcctgctgcggcaccgcggcggcctttctcctgggaagacgtggacaggttgctggaccccgccaacagagcccacctgggcctggaggagcagctgagagagctgctggacatgctcgacctcacctgcgctatgaagtccagcggctcccggagcaagcgggcaaagctgctcaaaaaggaaattgcccttctccgaaacaagctgagccagcagcacagccagcccctgcccacggggccaggcttggaaggcttcgaagaggacggagctgcgctggggccggaggcgggcgaggaagtccttccgaggttggagactcttctgcagccaaggaaaaggtcgcggagcacatgcggagactccgaggtggaggaggagtccccaggaaagcgcctggacgcaggtctcaccaacggctttgggggtgcgaggagcgagcaggagccgggcggcggcctggggaggaaggccacaccccgacgacgctgtgcctccgagtccagcatctcctccagcaacagcccgctctgcgactcgagctttaatgcgcccaaatgtgggcggggcaaaccggctcttgtgcgacggcacacgctggaggaccgcagtgagctgatctcctgcatcgagaatgggaactacgccaaggcggccaggatcgcagccgaagtcggccagagcagcatgtggatctccactgatgccgccgcctcggtgctggagcctctgaaggtggtgtgggccaagtgcagcggctacccctcctacccggcactgatcatcgaccccaagatgccccgtgtgcctggccaccacaacggcgtcaccatcccggccccacccctggacgtgctgaagattggggagcacatgcagaccaagtctgatgagaagctgttcctcgttctcttttttgataataagagaagttggcagtggcttcctaagtccaaaatggttccccttggtattgacgaaactatagacaagttaaagatgatggaagggaggaattccagcatccggaaggccgtgcggatcgcttttgaccgcgccatgaaccacctgagccgcgtccacggggagccgaccagcgacctcagtgacattgactga

SEQ ID NO: 221 - DNA, 2169 bp, Homo sapiens;
atgtctgcggagagcggccctgggacgagattgagaaatctgccagtaatgggggatggactagaaacttcccaaatgtctacaacacaggcccaggcccaaccccagccagccaacgcagccagcaccaaccccccgcccccagagacctccaaccctaacaagcccaagaggcagaccaaccaactgcaatacctgctcagagtggtgctcaagacactatggaaacaccagtttgcatggcctttccagcagcctgtggatgccgtcaagctgaacctccctgattactataagatcattaaaacgcctatggatatgggaacaataaagaagcgcttggaaaacaactattactggaatgctcaggaatgtatccaggacttcaacactatgtttacaaattgttacatctacaacaagcctggagatgacatagtcttaatggcagaagctctggaaaagctcttcttgcaaaaaataaatgagctacccacagaagaaaccgagatcatgatagtccaggcaaaaggaagaggacgtgggaggaaagaaacagggacagcaaaacctggcgtttccacggtaccaaacacaactcaagcatcgactcctccgcagacccagacccctcagccgaatcctcctcctgtgcaggccacgcctcaccccttccctgccgtcaccccggacctcatcgtccagacccctgtcatgacagtggtgcctccccagccactgcagacgcccccgccagtgcccccccagccacaacccccacccgctccagctccccagcccgtacagagccacccacccatcatcgcggccaccccacagcctgtgaagacaaagaagggagtgaagaggaaagcagacaccaccacccccaccaccattgaccccattcacgagccaccctcgctgcccccggagcccaagaccaccaagctgggccagcggcgggagagcagccggcctgtgaaacctccaaagaaggacgtgcccgactctcagcagcacccagcaccagagaagagcagcaaggtctcggagcagctcaagtgctgcagcggcatcctcaaggagatgtttgccaagaagcacgccgcctacgcctggcccttctacaagcctgtggacgtggaggcactgggcctacacgactactgtgacatcatcaagcaccccatggacatgagcacaatcaagtctaaactggaggcccgtgagtaccgtgatgctcaggagtttggtgctgacgtccgattgatgttctccaactgctataagtacaaccctcctgaccatgaggtggtggccatggcccgcaagctccaggatgtgttcgaaatgcgctttgccaagatgccggacgagcctgaggagccagtggtggccgtgtcctccccggcagtgccccctcccaccaaggttgtggccccgccctcatccagcgacagcagcagcgatagctcctcggacagtgacagttcgactgatgactctgaggaggagcgagcccagcggctggctgagctccaggagcagctcaaagccgtgcacgagcagcttgcagccctctctcagccccagcagaacaaaccaaagaaaaaggagaaagacaagaaggaaaagaaaaaagaaaagcacaaaaggaaagaggaagtggaagagaataaaaaaagcaaagccaaggaacctcctcctaaaaagacgaagaaaaataatagcagcaacagcaatgtgagcaagaaggagccagcgcccatgaagagcaagccccctcccacgtatgagtcggaggaagaggacaagtgcaagcctatgtcctatgaggagaagcggcagctcagcttggacatcaacaagctccccggcgagaagctgggccgcgtggtgcacatcatccagtcacgggagccctccctgaagaattccaaccccgacgagattgaaatcgactttgagaccctgaagccgtccacactgcgtgagctggagcgctatgtcacctcctgtttgcggaagaaaaggaaacctcaagctgagaaagttgatgtgattgccggctcctccaagatgaagggcttctcgtcctcagagtcggagagctccagtgagtccagctcctctgacagcgaagactccgaaacaggtcctgcctaa

SEQ ID NO: 222 - DNA, 516 bp, Homo sapiens;
atgcatcccttctacacccgggccgccaccatgataggcgagatcgccgccgccgtgtccttcatctccaagtttctccgcaccaaggggctcacgagcgagcgacagctgcagaccttcagccagagcctgcaggagctgctggcagaacattataaacatcactggttcccagaaaagccatgcaagggatcgggttaccgttgtattcgcatcaaccataaaatggatcctctgattggacaggcagcacagcggattggactgagcagtcaggagctgttcaggcttctcccaagtgaactcacactctgggttgacccctatgaagtgtcctacagaattggagaggatggctccatctgtgtgctgtatgaagcctcaccagcaggaggtagcactcaaaacagcaccaacgtgcaaatggtagacagccgaatcagctgtaaggaggaacttctcttgggcagaacgagcccttccaaaaactacaatatgatgactgtatcaggttaa

SEQ ID NO: 223 - DNA, 876 bp, Homo sapiens;
atgtctcaggaaggtgtggagctggagaagagcgtccggcgcctccgggagaagtttcatgggaaggtatcctccaagaaggcgggggctctgatgaggaaattcggcagcgaccacacgggagtggggcgctccatcgtgtacggggtaaagcaaaaagatggccaagaactaagtaacgatctggatgcccaggatccaccagaagatatgaagcaggaccgggacattcaggcagtggcgacctccctcctgccactgacagaagccaacctacgcatgtttcaacgtgcccaggacgaccttatccctgctgtggaccggcagtttgcctgctcctcctgcgaccacgtctggtggcgccgcgtgccccagcggaaggaggtatcccggtgccggaaatgccggaagcgctacgagccagtgccagctgacaagatgtggggcctggctgagttccactgcccgaagtgtcggcacaacttccggggctgggcacagatggggtccccgtccccctgctacgggtgcggcttccccgtgtatccaacacggatcctccccccgcgctgggaccgggacccggatcgccgcagcacccacactcactcctgctcagctgccgactgctacaaccggcgagagccccacgtgcctgggacatcctgtgctcaccccaagagccggaagcagaaccacctgcccaaagtgctccaccccagcaaccctcacattagcagtggctccactgtggccacctgcttgagccagggtggcctcctggaagacctggacaacctcatcctggaggacctgaaggaggaggaggaggaagaggaggaggtggaggacgaggagggcgggcccagggagtga

SEQ ID NO: 224 - DNA, 501 bp, Homo sapiens;
atggaggcggggccgcatccccggccggggcactgctgcaagcctggggggcggctggacatgaaccacggcttcgtgcaccatatccgacggaaccagatcgctcgggacgactatgacaagaaggtgaagcaggcggccaaggagaaggtgaggaggcggcacacgcccgcgccgacgcggccccgcaagccagacctgcaggtgtacctgccgcgacaccgagatgtctctgcccacccacgcaacccagactatgaagagtccggtgaaagcagcagtagtggaggctctgagctggagccttctggccatcagctcttctgcttagaatacgaggcagacagtggagaggtcacatcagttatcgtctatcagggtgatgacccaggaaaggtgagtgagaaggtgtcggcacacacgcctctggatccacccatgcgagaagccctcaagttgcgtatccaggaggagattgcaaagcgccagagccaacactga

SEQ ID NO: 225 - DNA, 1074 bp, Homo sapiens;; identical to SEQ ID NO: 4

SEQ ID NO: 226 - DNA, 1488 bp, Homo sapiens;
atggccaccaccgccacctgcacccgtttcaccgacgactaccagctcttcgaggagcttggcaagggtgctttctctgtggtccgcaggtgtgtgaagaaaacctccacgcaggagtacgcagcaaaaatcatcaataccaagaagttgtctgcccgggatcaccagaaactagaacgtgaggctcggatatgtcgacttctgaaacatccaaacatcgtgcgcctccatgacagtatttctgaagaagggtttcactacctcgtgtttgaccttgttaccggcggggagctgtttgaagacattgtggccagagagtactacagtgaagcagatgccagccactgtatacatcagattctggagagtgttaaccacatccaccagcatgacatcgtccacagggacctgaagcctgagaacctgctgctggcgagtaaatgcaagggtgccgccgtcaagctggctgattttggcctagccatcgaagtacagggagagcagcaggcttggtttggttttgctggcaccccaggttacttgtcccctgaggtcttgaggaaagatccctatggaaaacctgtggatatctgggcctgcggggtcatcctgtatatcctcctggtgggctatcctcccttctgggatgaggatcagcacaagctgtatcagcagatcaaggctggagcctatgatttcccatcaccagaatgggacacggtaactcctgaagccaagaacttgatcaaccagatgctgaccataaacccagcaaagcgcatcacggctgaccaggctctcaagcacccgtgggtctgtcaacgatccacggtggcatccatgatgcatcgtcaggagactgtggagtgtttgcgcaagttcaatgcccggagaaaactgaagggtgccatcctcacgaccatgcttgtctccaggaacttctcagctgccaaaagcctattgaacaagaagtcggatggcggtgtcaaggagccacaaaccactgtggtacacaacgctacagatgggatcaagggctccacagagagctgcaacaccaccacagaagatgaggacctcaaagtgcgaaaacaggagatcattaagattacagaacagctgattgaagccatcaacaatggggactttgaggcctacacgaagatttgtgatccaggcctcacttcctttgagcctgaggcccttggtaacctcgtggaggggatggatttccataagttttactttgagaatctcctgtccaagaacagcaagcctatccataccaccatcctaaacccacacgtccacgtgattggggaggacgcagcgtgcatcgcctacatccgcctcacccagtacatcgacgggcagggtcggcctcgcaccagccagtcagaagagacccgggtctggcaccgtcgggatggcaagtggctcaatgtccactatcactgctcaggggcccctgccgcaccgctgcagtga

SEQ ID NO: 227 - DNA, 1428 bp, Homo sapiens;
atggctgacatgcaaaatctggtagaaagattggagagggcagtgggccgcctggaggcagtatctcatacctctgacatgcaccgtgggtatgcagacagtccttcaaaagcaggagcagctccatatgtgcaggcatttgactcgctgcttgctggtcctgtggcagagtacttgaagatcagtaaagagattgggggagacgtgcagaaacatgcggagatggtccacacaggtttgaagttggagcgagctctgttggttacagcttctcagtgtcaacagccagcagaaaataagctttccgatttgttggcacccatctcagagcagatcaaagaagtgataacctttcgggagaagaaccgaggcagcaagttgtttaatcacctgtcagctgtcagcgaaagtatccaggccctgggctgggtggctatggctcccaagcctggcccttatgtgaaagaaatgaatgatgccgccatgttttatacaaaccgagtcctcaaagagtacaaagatgtggataagaagcatgtagactgggtcaaagcttatttaagtatatggacagagctgcaggcttacattaaggagttccataccaccggactggcctggagcaaaacggggcctgtggcaaaagaactgagcggactgccatctggaccctctgccggatcatgtcctcctccccctccaccatgcccccctcctcccccagtctctaccatttcatgctcatatgagtctgcttcccgctcatcactgttcgcgcagattaatcagggggagagcattacacatgccctgaaacatgtatctgatgacatgaagactcacaagaaccctgccctgaaggctcagagtggtccagtacgcagtggccccaaaccattctctgcacctaaaccccaaaccagcccatcccccaaacgagccacaaagaaggagccagctgtacttgaactggagggcaagaagtggagagtggaaaatcaggaaaatgtttccaacctggtgattgaggacacagagctgaaacaggtggcttacatatacaagtgtgtcaacacgacattgcaaatcaagggcaaaattaactccattacagtagataactgtaagaaacttggcctggtattcgatgacgtggtgggcattgtggagataatcaacagtaaggatgtcaaagttcaggtaatgggtaaagtgccaaccatatccatcaacaaaacagatggctgccatgcttacctgagcaagaattccctggattgtgaaatagtcagtgccaaatcttccgagatgaatgtcctcattcctacagaaggcggtgactttaatgaattcccagttcctgagcagttcaagaccctatggaacgggcagaagttggtcaccacagtgacagaaattgctggataa

SEQ ID NO: 228 - DNA, 2112 bp, Homo sapiens;
atggcggaccggcggcggcagcgcgcttcgcaagacaccgaggacgaggaatctggtgcttcgggctccgacagcggcggctccccgttgcggggaggcgggagctgcagcggtagcgccggaggcggcggcagcggctctctgccttcacagcgcggaggccgaaccggggcccttcatctgcggcgggtggagagcgggggcgccaagagtgctgaggagtcggagtgtgagagtgaagatggcattgaaggtgatgctgttctctcggattatgaaagtgcagaagactcggaaggtgaagaaggtgaatacagtgaagaggaaaactccaaagtggagctgaaatcagaagctaatgatgctgttaattcttcaacaaaagaagagaagggagaagaaaagcctgacaccaaaagcactgtgactggagagaggcaaagtggggacggacaggagagcacagagcctgtggagaacaaagtgggtaaaaagggccctaagcatttggatgatgatgaagatcggaagaatccagcatacatacctcggaaagggctcttctttgagcatgatcttcgagggcaaactcaggaggaggaagtcagacccaaggggcgtcagcgaaagctatggaaggatgagggtcgctgggagcatgacaagttccgggaagatgagcaggccccaaagtcccgacaggagctcattgctctttatggttatgacattcgctcagctcataatcctgatgacatcaaacctcgaagaatccggaaaccccgatatgggagtcctccacaaagagatccaaactggaacggtgagcggctaaacaagtctcatcgccaccagggtcttgggggcaccctaccaccaaggacatttattaacaggaatgctgcaggtaccggccgtatgtctgcacccaggaattattctcgatctgggggcttcaaggaaggtcgtgctggttttaggcctgtggaagctggtgggcagcatggtggccggtctggtgagactgttaagcatgagattagttaccggtcacggcgcctagagcagacttctgtgagggatccatctccagaagcagatgctccagtgcttggcagtcctgagaaggaagaggcagcctcagagccaccagctgctgctcctgatgctgcaccaccaccccctgataggcccattgagaagaaatcctattcccgggcaagaagaactcgaaccaaagttggagatgcagtcaagcttgcagaggaggtgccccctcctcctgaaggactgattccagcacctccagtcccagaaaccaccccaactccacctactaagactgggacctgggaagctccggtggattctagtacaagtggacttgagcaagatgtggcacaactaaatatagcagaacagaattggagtccggggcagccttctttcctgcaaccacgggaacttcgaggtatgcccaaccatatacacatgggagcaggacctccacctcagtttaaccggatggaagaaatgggtgtccagggtggtcgagccaaacgctattcatcccagcggcaaagacctgtgccagagccccccgcccctccagtgcatatcagtatcatggagggacattactatgatccactgcagttccagggaccaatctatacccatggtgacagccctgccccgctgcctccacagggcatgcttgtgcagccaggaatgaaccttccccacccaggtttacatccccaccagacaccagctcctctgcccaatccaggcctctatcccccaccagtgtccatgtctccaggacagccaccacctcagcagttgcttgctcctacttacttttctgctccaggcgtcatgaactttggtaatcccagttacccttatgctccaggggcactgcctcccccaccaccgcctcatctgtatcctaatacacaggccccatcacaggtatatggaggagtgacctactataaccccgcccagcagcaggtgcagccaaagccctccccaccccggaggactccccagccagtcaccatcaagccccctccacctgaggttgtaagcaggggttccagttaa

SEQ ID NO: 229 - DNA, 1491 bp, Homo sapiens;
atggacttcagcagaaatctttatgatattggggaacaactggacagtgaagatctggcctccctcaagttcctgagcctggactacattccgcaaaggaagcaagaacccatcaaggatgccttgatgttattccagagactccaggaaaagagaatgttggaggaaagcaatctgtccttcctgaaggagctgctcttccgaattaatagactggatttgctgattacctacctaaacactagaaaggaggagatggaaagggaacttcagacaccaggcagggctcaaatttctgcctacaggttccacttctgccgcatgagctgggctgaagcaaacagccagtgccagacacagtctgtacctttctggcggagggtcgatcatctattaataagggtcatgctctatcagatttcagaagaagtgagcagatcagaattgaggtcttttaagtttcttttgcaagaggaaatctccaaatgcaaactggatgatgacatgaacctgctggatattttcatagagatggagaagagggtcatcctgggagaaggaaagttggacatcctgaaaagagtctgtgcccaaatcaacaagagcctgctgaagataatcaacgactatgaagaattcagcaaaggggaggagttgtgtggggtaatgacaatctcggactctccaagagaacaggatagtgaatcacagactttggacaaagtttaccaaatgaaaagcaaacctcggggatactgtctgatcatcaacaatcacaattttgcaaaagcacgggagaaagtgcccaaacttcacagcattagggacaggaatggaacacacttggatgcaggggctttgaccacgacctttgaagagcttcattttgagatcaagccccacgatgactgcacagtagagcaaatctatgagattttgaaaatctaccaactcatggaccacagtaacatggactgcttcatctgctgtatcctctcccatggagacaagggcatcatctatggcactgatggacaggaggcccccatctatgagctgacatctcagttcactggtttgaagtgcccttcccttgctggaaaacccaaagtgttttttattcaggcttgtcagggggataactaccagaaaggtatacctgttgagactgattcagaggagcaaccctatttagaaatggatttatcatcacctcaaacgagatatatcccggatgaggctgactttctgctggggatggccactgtgaataactgtgtttcctaccgaaaccctgcagagggaacctggtacatccagtcactttgccagagcctgagagagcgatgtcctcgaggcgatgatattctcaccatcctgactgaagtgaactatgaagtaagcaacaaggatgacaagaaaaacatggggaaacagatgcctcagcctactttcacactaagaaaaaaacttgtcttcccttctgattga

SEQ ID NO: 230 - DNA, 756 bp, Homo sapiens;
atggagctgtcagccatcggcgagcaggtgttcgccgtggagagcatccggaagaagcgcgtgcggaagggtaaagtcgagtatctggtgaagtggaaaggatggcccccaaagtacagcacgtgggagccagaagagcacatcttggacccccgcctcgtcatggcctacgaggagaaggaggagagagaccgagcatcggggtataggaagagaggtccgaaacccaagcggcttctgctgcagcggctgtacagcatggacctgcggagctcccacaaggccaagggcaaggagaagctctgcttctccctgacgtgcccactcggcagcgggagccctgagggggtggtcaaggcgggggcacctgagctggtggacaagggccccttggtgcccaccctgcccttcccgctccgcaagccccgaaaggcccacaagtacctgcggctctcgcgcaagaagttcccgccccgcgggcccaacctggagagccacagccatcgacgggagctcttcctgcaggagccaccggccccagacgtcctgcaggcggctggcgagtgggagcctgctgcgcagccccctgaagaggaggcagatgccgacctggccgaggggccccctccctggacacctgcgctcccctcaagtgaggtgaccgtgaccgacatcaccgccaactccatcaccgtcaccttccgcgaggcccaggcagctgagggcttcttccgagaccgcagtgggaagttctga

SEQ ID NO: 231 - DNA, 879 bp, Homo sapiens;
atggagctgctgtgttgcgaaggcacccggcacgcgccccgggccgggccggacccgcggctgctgggggaccagcgtgtcctgcagagcctgctccgcctggaggagcgctacgtaccccgcgcctcctacttccagtgcgtgcagcgggagatcaagccgcacatgcggaagatgctggcttactggatgctggaggtatgtgaggagcagcgctgtgaggaggaagtcttccccctggccatgaactacctggatcgctacctgtcttgcgtccccacccgaaaggcgcagttgcagctcctgggtgcggtctgcatgctgctggcctccaagctgcgcgagaccacgcccctgaccatcgaaaaactgtgcatctacaccgaccacgctgtctctccccgccagttgcgggactgggaggtgctggtcctagggaagctcaagtgggacctggctgctgtgattgcacatgatttcctggccttcattctgcaccggctctctctgccccgtgaccgacaggccttggtcaaaaagcatgcccagacctttttggccctctgtgctacagattatacctttgccatgtacccgccatccatgatcgccacgggcagcattggggctgcagtgcaaggcctgggtgcctgctccatgtccggggatgagctcacagagctgctggcagggatcactggcactgaagtggactgcctgcgggcctgtcaggagcagatcgaagctgcactcagggagagcctcagggaagcctctcagaccagctccagcccagcgcccaaagccccccggggctccagcagccaagggcccagccagaccagcactcctacagatgtcacagccatacacctgtag

SEQ ID NO: 232 - DNA, 1035 bp, Homo sapiens;
atgaaggatttgggggcagagcacttggcaggtcatgaaggggtccaacttctcgggttgttgaacgtctacctggaacaagaagagagattccaacctcgagaaaaagggctgagtttgattgaggctaccccggagaatgataacactttgtgtccaggattgagaaatgccaaagttgaagatttaaggagtttagccaacttttttggatcttgcactgaaacttttgtcctggctgtcaatattttggacaggttcttggctcttatgaaggtgaaacctaaacatttgtcttgcattggagtctgttcttttttgctggctgctagaatagttgaagaagactgcaatattccatccactcatgatgtgatccggattagtcagtgtaaatgtactgcttctgacataaaacggatggaaaaaataatttcagaaaaattgcactatgaattggaagctactactgccttaaactttttgcacttataccatactattatactttgtcatacttcagaaaggaaagaaatactgagccttgataaactagaagctcagctgaaagcttgcaactgccgactcatcttttcaaaagcaaaaccatctgtattagccttgtgccttctcaatttggaagtggaaactttgaaatctgttgaattactggaaattctcttgctagttaaaaaacattccaagattaatgacactgagttcttctactggagagagttggtttctaaatgcctagccgagtattcttctcctgaatgttgcaaaccagatcttaagaagttggtttggatcgtttcaaggcgcacagcccagaacctccacaacagctactatagtgttcctgagctgccaacgatacctgaggggggttgttttgatgaaagtgaaagtgaggactcttgtgaagatatgagttgtggagaggagagtctcagcagctctcctcccagtgatcaagagtgcaccttctttttcaacttcaaagtggcacaaacactgtgctttccatcttag

SEQ ID NO: 233 - DNA, 1992 bp, Homo sapiens;
atggcgtcgggccgtggagcttcttctcgctggttctttactcgggaacagctggagaacacgccgagccgccgctgcggagtggaggcggataaagagctctcgtgccgccagcaggcggccaacctcatccaggagatgggacagcgtctcaatgtctctcagcttacaataaacactgcgattgtttatatgcacaggttttatatgcaccattctttcaccaaattcaacaaaaatataatatcgtctactgcattatttttggctgcaaaagtggaagaacaggctcgaaaacttgaacatgttatcaaagtagcacatgcttgtcttcatcctctagagccactgctggatactaaatgtgatgcttaccttcaacagactcaagaactggttatacttgaaaccataatgctacaaactctaggttttgagatcaccattgaacacccacacacagatgtggtgaaatgtacccagttagtaagagcaagcaaggatttggcacagacatcctatttcatggctaccaacagtctgcatcttacaaccttctgtcttcagtacaaaccaacagtgatagcatgtgtatgcattcatttggcttgcaaatggtccaattgggagatccctgtatcaactgatggaaagcattggtgggaatatgtggatcctacagttactctagaattattagatgagctaacacatgagtttctacaaatattggagaaaacgcctaataggttgaagaagattcgaaactggagggctaatcaggcagctaggaaaccaaaagtagatggacaggtatcagagacaccacttcttggttcatctttggtccagaattccattttagtagatagtgtcactggtgtgcctacaaacccaagttttcagaaaccatctacatcagcattccctgcgccagtacctctaaattcaggaaatatttctgttcaagacagccatacatctgataatttgtcaatgctagcaacaggaatgccaagtacttcatacggtttatcatcacaccaggaatggcctcaacatcaagactcagcaaggacagaacagctatattcacagaaacaggagacatctttgtctggtagccagtacaacatcaacttccagcagggaccttctatatcactgcattcaggattacatcacagacctgacaaaatttcagatcattcttctgttaagcaagaatatactcataaagcagggagcagtaaacaccatgggccaatttccactactccaggaataattcctcagaaaatgtctttagataaatatagagaaaagcgtaaactagaaactcttgatctcgatgtaagggatcattatatagctgcccaggtagaacagcagcacaaacaagggcagtcacaggcagccagcagcagttctgttacttctcccattaaaatgaaaatacctatcgcaaatactgaaaaatacatggcagacaaaaaggaaaagagtgggtcactgaaattacggattccaataccacccactgataaaagcgccagtaaagaagaactgaaaatgaaaataaaagtttcttcttcagaaagacacagctcttctgatgaaggcagtgggaagagcaaacattcaagcccacatattagcagagaccataaggagaagcacaaggagcatccttcaagccgccaccacaccagcagccacaagcattcccactcgcatagtggcagcagcagcggtggcagtaaacacagtgccgacggaataccacccactgttctgaggagtcctgttggcctgagcagtgatggcatttcctctagctccagctcttcaaggaagaggctgcatgtcaatgatgcatctcacaaccaccactccaaaatgagcaaaagttccaaaagttcaggtgggctacggacatctcagcaccctcgtgaaactggacaagaagccagtggagaccaacggtcctga

SEQ ID NO: 234 - DNA, 1137 bp, Homo sapiens;
atggacctggggaaaccaatgaaaagcgtgctggtggtggctctccttgtcattttccaggtatgcctgtgtcaagatgaggtcacggacgattacatcggagacaacaccacagtggactacactttgttcgagtctttgtgctccaagaaggacgtgcggaactttaaagcctggttcctccctatcatgtactccatcatttgtttcgtgggcctactgggcaatgggctggtcgtgttgacctatatctatttcaagaggctcaagaccatgaccgatacctacctgctcaacctggcggtggcagacatcctcttcctcctgacccttcccttctgggcctacagcgcggccaagtcctgggtcttcggtgtccacttttgcaagctcatctttgccatctacaagatgagcttcttcagtggcatgctcctacttctttgcatcagcattgaccgctacgtggccatcgtccaggctgtctcagctcaccgccaccgtgcccgcgtccttctcatcagcaagctgtcctgtgtgggcatctggatactagccacagtgctctccatcccagagctcctgtacagtgacctccagaggagcagcagtgagcaagcgatgcgatgctctctcatcacagagcatgtggaggcctttatcaccatccaggtggcccagatggtgatcggctttctggtccccctgctggccatgagcttctgttaccttgtcatcatccgcaccctgctccaggcacgcaactttgagcgcaacaaggccatcaaggtgatcatcgctgtggtcgtggtcttcatagtcttccagctgccctacaatggggtggtcctggcccagacggtggccaacttcaacatcaccagtagcacctgtgagctcagtaagcaactcaacatcgcctacgacgtcacctacagcctggcctgcgtccgctgctgcgtcaaccctttcttgtacgccttcatcggcgtcaagttccgcaacgatctcttcaagctcttcaaggacctgggctgcctcagccaggagcagctccggcagtggtcttcctgtcggcacatccggcgctcctccatgagtgtggaggccgagaccaccaccaccttctccccatag

SEQ ID NO: 235 - DNA, 846 bp, Homo sapiens;
atgtcagcccaggagagctgcctcagcctcatcaagtacttcctcttcgttttcaacctcttcttcttcgtcctcggcagcctgatcttctgcttcggcatctggatcctcattgacaagaccagcttcgtgtcctttgtgggcttggccttcgtgcctctgcagatctggtccaaagtcctggccatctcaggaatcttcaccatgggcatcgccctcctgggttgtgtgggggccctcaaggagctccgctgcctcctgggcctgtattttgggatgctgctgctcctgtttgccacacagatcaccctgggaatcctcatctccactcagcgggcccagctggagcgaagcttgcgggacgtcgtagagaaaaccatccaaaagtacggcaccaaccccgaggagaccgcggccgaggagagctgggactatgtgcagttccagctgcgctgctgcggctggcactacccgcaggactggttccaagtcctcatcctgagaggtaacgggtcggaggcgcaccgcgtgccctgctcctgctacaacttgtcggcgaccaacgactccacaatcctagataaggtgatcttgccccagctcagcaggcttggacacctggcgcggtccagacacagtgcagacatctgcgctgtccctgcagagagccacatctaccgcgagggctgcgcgcagggcctccagaagtggctgcacaacaaccttatttccatagtgggcatttgcctgggcgtcggcctactcgagctcgggttcatgacgctctcgatattcctgtgcagaaacctggaccacgtctacaaccggctcgctcgataccgttag

SEQ ID NO: 236 - DNA, 1959 bp, Homo sapiens;
atggccacctccatgggcctgctgctgctgctgctgctgctcctgacccagcccggggcggggacgggagctgacacggaggcggtggtctgcgtggggaccgcctgctacacggcccactcgggcaagctgagcgctgccgaggcccagaaccactgcaaccagaacgggggcaacctggccactgtgaagagcaaggaggaggcccagcacgtccagcgagtactggcccagctcctgaggcgggaggcagccctgacggcgaggatgagcaagttctggattgggctccagcgagagaagggcaagtgcctggaccctagtctgccgctgaagggcttcagctgggtgggcgggggggaggacacgccttactctaactggcacaaggagctccggaactcgtgcatctccaagcgctgtgtgtctctgctgctggacctgtcccagccgctccttcccagccgcctccccaagtggtctgagggcccctgtgggagcccaggctcccccggaagtaacattgagggcttcgtgtgcaagttcagcttcaaaggcatgtgccggcctctggccctggggggcccaggtcaggtgacctacaccacccccttccagaccaccagttcctccttggaggctgtgccctttgcctctgcggccaatgtagcctgtggggaaggtgacaaggacgagactcagagtcattatttcctgtgcaaggagaaggcccccgatgtgttcgactggggcagctcgggccccctctgtgtcagccccaagtatggctgcaacttcaacaatgggggctgccaccaggactgctttgaagggggggatggctccttcctctgcggctgccgaccaggattccggctgctggatgacctggtgacctgtgcctctcgaaacccttgcagctccagcccatgtcgtgggggggccacgtgcgtcctgggaccccatgggaaaaactacacgtgccgctgcccccaagggtaccagctggactcgagtcagctggactgtgtggacgtggatgaatgccaggactccccctgtgcccaggagtgtgtcaacacccctgggggcttccgctgcgaatgctgggttggctatgagccgggcggtcctggagagggggcctgtcaggatgtggatgagtgtgctctgggtcgctcgccttgcgcccagggctgcaccaacacagatggctcatttcactgctcctgtgaggagggctacgtcctggccggggaggacgggactcagtgccaggacgtggatgagtgtgtgggcccggggggccccctctgcgacagcttgtgcttcaacacacaagggtccttccactgtggctgcctgccaggctgggtgctggccccaaatggggtctcttgcaccatggggcctgtgtctctgggaccaccatctgggccccccgatgaggaggacaaaggagagaaagaagggagcaccgtgccccgtgctgcaacagccagtcccacaaggggccccgagggcacccccaaggctacacccaccacaagtagaccttcgctgtcatctgacgcccccatcacatctgccccactcaagatgctggcccccagtgggtccccaggcgtctggagggagcccagcatccatcacgccacagctgcctctggcccccaggagcctgcaggtggggactcctccgtggccacacaaaacaacgatggcactgacgggcaaaagctgcttttattctacatcctaggcaccgtggtggccatcctactcctgctggccctggctctggggctactggtctatcgcaagcggagagcgaagagggaggagaagaaggagaagaagccccagaatgcggcagacagttactcctgggttccagagcgagctgagagcagggccatggagaaccagtacagtccgacacctgggacagactgctga

SEQ ID NO: 237 - DNA, 2229 bp, Homo sapiens;
atgggaggccgcgtctttctcgcattctgtgtctggctgactctgccgggagctgaaacccaggactccaggggctgtgcccggtggtgccctcagaactcctcgtgtgtcaatgccaccgcctgtcgctgcaatccagggttcagctctttttctgagatcatcaccaccccgacggagacttgtgacgacatcaacgagtgtgcaacaccgtcgaaagtgtcatgcggaaaattctcggactgctggaacacagaggggagctacgactgcgtgtgcagcccgggatatgagcctgtttctggggcaaaaacattcaagaatgagagcgagaacacctgtcaagatgtggacgagtgcagctccgggcagcatcagtgtgacagctccaccgtctgcttcaacaccgtgggttcatacagctgccgctgccgcccaggctggaagcccagacacggaatcccgaataaccaaaaggacactgtctgtgaagatatgactttctccacctggaccccgccccctggagtccacagccagacgctttcccgattcttcgacaaagtccaggacctgggcagagactccaagacaagctcagccgaggtcaccatccagaatgtcatcaaattggtggatgaactgatggaagctcctggagacgtagaggccctggcgccacctgtccggcacctcatagccacccagctgctctcaaaccttgaagatatcatgaggatcctggccaagagcctgcctaaaggccccttcacctacatttccccttcgaacacagagctgaccctgatgatccaggagcggggggacaagaacgtcactatgggtcagagcagcgcacgcatgaagctgaattgggctgtggcagctggagccgaggatccaggccccgccgtggcgggcatcctctccatccagaacatgacgacattgctggccaatgcctccttgaacctgcattccaagaagcaagccgaactggaggagatatatgaaagcagcatccgtggtgtccaactcagacgcctctctgccgtcaactccatctttctgagccacaacaacaccaaggaactcaactcccccatccttttcgccttctcccaccttgagtcctccgatggggaggcgggaagagaccctcctgccaaggacgtgatgcctgggccacggcaggagctgctctgtgccttctggaagagtgacagcgacaggggagggcactgggccaccgagggctgccaggtgctgggcagcaagaacggcagcaccacctgccaatgcagccacctgagcagctttgcgatccttatggctcattatgacgtggaggactggaagctgaccctgatcaccagggtgggactggcgctgtcactcttctgcctgctgctgtgcatcctcactttcctgctggtgcggcccatccagggctcgcgcaccaccatacacctgcacctctgcatctgcctcttcgtgggctccaccatcttcctggccggcatcgagaacgaaggcggccaggtggggctgcgctgccgcctggtggccgggctgctgcactactgtttcctggccgccttctgctggatgagcctcgaaggcctggagctctactttcttgtggtgcgcgtgttccaaggccagggcctgagtacgcgctggctctgcctgatcggctatggcgtgcccctgctcatcgtgggcgtctcggctgccatctacagcaagggctacggccgccccagatactgctggttggactttgagcagggcttcctctggagcttcttgggacctgtgaccttcatcattttgtgcaatgctgtcattttcgtgactaccgtctggaagctcactcagaagttttctgaaatcaatccagacatgaagaaattaaagaaggcgagggcgctgaccatcacggccatcgcgcagctcttcctgttgggctgcacctgggtctttggcctgttcatcttcgacgatcggagcttggtgctgacctatgtgtttaccatcctcaactgcctgcagggcgccttcctctacctgctgcactgcctgctcaacaagaaggttcgggaagaataccggaagtgggcctgcctagttgctggggggagcaagtactcagaattcacctccaccacgtctggcactggccacaatcagacccgggccctcagggcatcagagtccggcatatga

SEQ ID NO: 238 - DNA, 642 bp, Homo sapiens;
atgccagacgaaaatatcttcctgttcgtgcccaacctcatcggttatgcccggattgtcttcgccatcatttctttctacttcatgccctgctgccccctcacggcctcctccttctacctgctcagcggcctgctggacgctttcgatggacacgctgctcgcgctcttaatcaaggaacccggtttggggccatgctggacatgctgacggaccgctgctccaccatgtgcctgttggtcaacctggccctgctgtaccctggagccacgctgttcttccaaatcagcatgagtttggatgtggccagtcactggctgcacctccacagttctgtggtccgaggcagtgagagtcacaagatgatcgacttgtccgggaatccggtgcttcggatctactacacctcgaggcctgctctgttcaccttgtgtgctgggaatgagctcttctactgcctcctctacctgttccatttctctgagggacctttagttggctctgtgggactgttccggatgggcctctgggtcactgcccccatcgccttgctgaagtcgctcatcagcgtcatccacctgatcacggccgcccgcaacatggctgccctggacgcagcagaccgcgccaagaagaagtga

SEQ ID NO: 239 - DNA, 4755 bp, Homo sapiens;
atgagcttaacatcctggtttttggtgagcagtggaggcactcgccacaggctgccacgagaaatgatttttgttggaagagatgactgtgagctcatgttgcagtctcgtagtgtggataagcaacacgctgtcatcaactatgatgcgtctacggatgagcatttagtgaaggatttgggcagcctcaatgggacttttgtgaatgatgtaaggattccggaacagacttatatcaccttgaaacttgaagataagctgagatttggatatgatacaaatcttttcactgtagtacaaggagaaatgagggtccctgaagaagctcttaagcatgagaagtttaccattcagcttcagttgtcccaaaaatcttcagaatcagaattatccaaatctgcaagtgccaaaagcatagattcaaaggtagcagacgctgctactgaagtgcagcacaaaactactgaagcactgaaatccgaggaaaaagccatggatatttctgctatgccccgtggtactccattatatgggcagccgtcatggtggggggatgatgaggtggatgaaaaaagagctttcaagacaaatggcaaacctgaagaaaaaaaccatgaagctggaacatcagggtgcggcatagatgccaagcaagttgaggaacaatctgcagctgcaaatgaagaagtactttttcctttctgtagggaaccaagttattttgaaatccctacaaaagaattccagcaaccatcacaaataacagaaagcactattcatgaaatcccaacaaaagacacgccaagttcccatataacaggtgcagggcatgcttcatttaccattgaatttgatgacagtaccccagggaaggtaactattagagaccatgtgacaaagtttacttctgatcagcgccacaagtccaagaagtcttctcctggaactcaagacttgctggggattcaaacaggaatgatggcacccgaaaacaaagttgctgactggctagcacaaaacaaccctcctcaaatgctatgggaaagaacagaagaggattctaaaagcattaaaagtgatgttccagtgtacttgaaaaggttgaaaggaaataaacatgatgatggtacgcaaagtgattcagagaacgctggggctcacaggcgctgtagcaaacgtgcaactcttgaggaacacttaagacgccaccattcagaacacaaaaagctacagaaggtccaggctactgaaaagcatcaagaccaagctgttactagctctgcgcatcacagaggggggcatggtgttccacatgggaaattgttaaaacagaaatcagaggagccatcggtgtcaatacccttcctacaaactgcattattaagaagttcagggagtcttgggcacagaccaagccaggagatggataaaatgttaaaaaatcaagcaacttctgctacttctgaaaaggataatgatgatgaccaaagtgacaagggtacttataccattgagttagagaatcccaacagtgaggaagtggaagcaagaaaaatgattgacaaggtgtttggagtagatgacaatcaggattataataggcctgttatcaacgaaaaacataaagatctaataaaagattgggctctcagttctgctgcagcagtaatggaagaaagaaaaccactgactacatctggatttcaccactcagaggaaggcacatcttcatctggaagcaaacgttgggtttcacagtgggctagtttggctgccaatcatacaaggcatgatcaagaagaaaggataatggaattttctgcacctcttcctttagagaatgagacagagatcagtgagtctggcatgacagtgagaagtactggctctgcaacttccttggctagccagggagagagaaggagacgaactcttccccagcttccaaatgaagaaaagtctcttgagagccacagagcaaaggttgtaacacagaggtcagagataggagaaaaacaagacacagaacttcaggagaaagaaacacctacacaggtataccagaaagataaacaagatgctgacagacccttgagtaaaatgaacagggcagtaaatggagagactctcaaaactggtggagataataaaaccctacttcacttaggcagctctgctcctggaaaagagaaaagtgaaactgataaggaaacttctttggtaaagcaaacattagcaaaacttcaacaacaagaacaaagggaggaggctcagtggacacctactaaattgtcttccaaaaatgtttcaggtcagacagataaatgtagggaggaaacttttaaacaagaatcacaacctccagaaaaaaattcaggacattctacaagcaaaggagacagagtggcacaaagtgagagcaagagaagaaaagctgaggaaattctgaaaagtcagactccaaagggaggagacaagaaggaatcctccaagtcattagtgcgacaagggagcttcactatagaaaaacccagcccaaacatacccatagaacttattccccatataaataaacagacttcctctactccttcttctttagcattaacatctgcaagtagaatacgagaaagaagtgagtctttggatcctgattctagtatggacacaacccttattctaaaagacacagaagcagtaatggcttttctagaagctaaactacgtgaagataataaaactgatgaaggaccagatactcccagttataatagagacaattctatttcaccagaatctgatgtagatacagctagtacaatcagtctggttactggagaaactgaaagaaagtcaacccaaaagcgaaagagtttcactagcctctataaagataggtgttccacaggttctccttccaaagatgttacaaaatcatcatcttcaggtgctagggaaaaaatggaaaagaaaacaaaaagtcgttccacagatgtgggttcaagagcagatggtcgtaaatttgttcagtccagtgggagaataagacagccctcagtagacttaacagatgatgaccaaacctctagtgtacctcattctgccatctctgatattatgtcatctgatcaagaaacttactcttgtaaacctcatggacggactccacttacctcagctgatgagcatgtacattccaaactggaaggaagtaaagtaacgaaatctaagacttctccggtggtatctggttcatctagtaaatcaaccacccttccaaggccacgacctaccaggacttccctcttgcgcagagcacgacttggtgaagcttcagacagtgaacttgctgatgctgacaaagcatctgttgcttctgaagtatccacaacaagttctacatcaaaacctcccacaggaaggcgtaacatctctcggattgatttattggctcagcctcgtagaacacgacttggctcactgtcagctcgtagtgactctgaagcaacaatttctagaagtagtgcctcttcgaggaccgcagaagccatcattagaagtggagccagactagtaccatcagataaattttctcctagaattagagctaacagtatctctcgactctcagactccaaggtcaaaagtatgacctcagctcatggctctgcttcagtaaattcaagatggaggcgctttcctactgattatgcttccacctcagaagatgaatttggatcaaaccgtaattcccctaaacatacccgtctacgtacttctccagccctgaaaaccactcgcttgcagagcgctggatcagcaatgcctactagttcttcattcaaacaccggattaaagagcaggaagactacatccgagattggactgctcatcgagaagagatagccaggatcagccaagatcttgctctcattgctcgggagatcaacgatgtagcaggagagatagattcagtgacttcatcaggcactgcccctagtaccacagtaagcactgctgccaccacccctggctctgccatagacactagagaagagttggttgatcgtgtttttgatgaaagcctcaacttccgaaagattcctccattagttcattccaaaacaccagaaggaaacaacggtcgatctggtgatccaagacctcaagcagcagagcctcccgatcacttaacaattacaaggcggagaacctggagcagggatgaagtcatgggagataatctgctgctgtcatccgtctttcagttctctaagaagataagacaatctatagataagacagctggaaagatcagaatattatttaaagacaaagatcggaattgggatgacatagaaagcaaattaagagccgaaagtgaagtccctattgtgaaaacctcaagcatggagatttcttctatcttacaggaactgaaaagagtagaaaagcagctgcaagcaatcaatgctatgattgatcctgatggaactttggaggctctgaacaacatgggatttcccagtgctatgttgccatctccaccgaaacagaagtccagccctgtgaataaccaccacagcccgggtcagacaccaacacttggccaaccagaagctagggctcttcatcctgctgctgtttcagccgcagctgaatttgagaatgctgaatctgaggctgatttcagtatacatttcaatagattcaaccccgatggggaagaggaagatgttacagtacaagaatga

SEQ ID NO: 240 - DNA, 2274 bp, Homo sapiens;
atggccctgggtgaagaaaaggcagaagcggaagcatctgaagacacaaaggcccagtcctatgggagagggagctgcagggagcgggagctggacatcccagggcccatgagtggggagcagcccccacgcctggaagctgagggagggctcatctcccctgtatggggggcagaagggatacctgcccctacttgctggattgggactgaccctggcggcccctctagagcccaccagccacaggccagtgatgccaacagagagcccgtagctgagaggtctgagcctgcactcagtggcctgcctcctgccaccatggggtctggagaccttctgctctccggggaaagccaggtggagaagaccaagctttcttcctccgaggagttccctcagactctgagccttcccagaacaacaactatttgctcaggacatgatgctgataccgaagatgatccatccctagcagatttgccccaggcactggacctcagccagcagcctcacagctcaggtctctcttgcctgtcacagtggaagtccgtgctgagcccaggttccgcagctcagccttccagctgcagcatctctgcttcctccacaggcagcagtctccagggtcaccaggagagggcggagcctcgtggtggttctctggccaaggtctcctcctccctggagccggtcgtcccccaggaaccttcctctgtggtggggctaggacctcggccccagtggtcaccacagcctgtgttctctgggggtgatgcttctgggctaggcaggagacgcctctccttccaggctgagtactgggcctgtgtgctgccagattccctgcctccatcacccgaccgccactcccctctctggaacccaaataaagagtatgaagatctgcttgactatacttacccactgaggcccgggcctcagctcccaaagcaccttgatagccgtgtgccagctgaccctgtcctgcaggactccggggtagacctggatagcttctctgtctctccagcaagcaccctcaaatcacctactaatgtctcccccaactgcccaccagcagaggccactgccctgccattttctgggcccagagagccaagccttaagcagtggccctccagagtaccccagaaacagggtggcatgggcttggcatcttggagccaacttgcatctacccccagagccccaggcagtagggatgctcgttgggagcgcagagagccagccctgaggggtgcgaaggaccggctgactataggcaagcaccttgatatgggctctccccagctaaggacacgggacagagggtggccctcgcccaggccagagagggagaagaggaccagccagagtgcccggcgccctacctgcacagagtctaggtggaaatcagaagaggaagtggaaagtgatgacgagtatcttgccctccccgctcggctgacacaggtttctagcctggtttcgtatctaggatccatttctaccttggttaccctgcccactggggatatcaaagggcagagccccttggaagtgtcagacagtgatgggccagcttccttcccttcaagctccagccaaagccagcttccccctggagctgccctccaaggatctggggatcctgagggccagaatccctgtttcctgcgctccttcgtccgtgcccacgactccgcaggggaaggcagtctggggagcagccaggccctcggggtctcctctggactgctgaaaacacgcccctccttgccagctaggttggaccggtggccattctcagacccagatgttgaagggcagcttcccaggaaaggaggagaacagggaaaagaatcactggtgcaatgtgtgaagacattttgctgtcagctggaagagctgatctgctggctgtataatgttgcagatgttactgaccacgggactgcagccaggtccaatcttacaagtctcaagtcttctctgcagctttaccggcaatttaagaaagatatagatgaacatcagtctctgacggagagtgtcttacagaagggggagattcttcttcagtgcctgttggagaacaccccagttttagaggatgtccttgggaggatcgcaaagcagtctggtgagctggagagccacgcagatcgcctgtatgactctatcttggcctctctggacatgctggctggctgcacccttatccctgacaaaaagcccatggcggcaatggagcacccatgtgaaggggtttaa

SEQ ID NO: 241 - DNA, 5901 bp, Homo sapiens;
atgaaggcggcagacactgtgatcctgtgggcaagaagtaaaaatgaccagctgaggatttcttttcctccaggactgtgttggggtgacaggatgcctgataaggatgacattcggctgctgccgtcagcattgggtgtgaagaagagaaaacgaggacccaagaagcagaaggagaacaagccaggaaaaccccgaaaacgcaagaagcgtgacagtgaggaggaatttggttctgagcgagatgagtaccgggagaagtcagagagtgggggcagtgaatatggaaccggaccgggtcggaaacgaagaaggaagcaccgagaaaaaaaggagaagaagacaaagcggcggaaaaagggggagggagatggggggcaaaagcaagtggaacagaagtcatcagcaactctgcttctgacctggggcctggaggatgtggagcatgtgttctctgaggaggattaccacacgctcaccaactacaaagccttcagccagttcatgaggcccctaattgctaagaagaatcctaagatcccaatgtctaagatgatgaccatccttggggccaaatggagagagttcagtgccaacaaccccttcaaggggtcagcagctgctgtggcggcggcagcggcagcagcagcagcagctgtagctgagcaggtgtcagctgctgtctcgtcggccacccccatagcaccctccggaccccccgcccttccaccaccccctgctgctgatatccagcccccacccatccgaagagccaaaaccaaagagggcaaaggtccaggccataagaggcggagtaagagcccccgagtgcctgatggacgcaagaagcttcggggaaagaaaatggcaccactcaaaataaaactagggcttctgggtggcaagaggaagaaaggaggctcgtatgtttttcagagcgacgaaggtcctgaaccagaggctgaggaatcagacctggacagtggcagtgtccacagtgcctcaggccggcctgatggccctgtccgcaccaagaaactaaagagaggccggccaggaaggaagaagaagaaggtcctgggctgtcctgcagtggccggggaggaggaggttgatggctacgagacggatcaccaggattactgtgaggtgtgccagcagggtggggaaattattctgtgtgacacctgccctcgtgcctaccacctcgtctgccttgatcctgagcttgaccgggctccagagggcaaatggagctgccctcactgtgagaaggagggggtccagtgggaggccaaggaggaagaagaagaatacgaagaggagggagaggaagaaggggagaaggaggaggaggatgatcacatggagtactgccgcgtatgcaaggacggcggggagctcctgtgctgtgacgcgtgcatctcctcctaccacattcattgtctaaaccctcccctgcctgacattcccaatggtgaatggctgtgtccccgatgcacatgccccgtgctgaagggtcgagtgcagaagatcctacattggcggtggggggagccacctgtagcagtgccagcccctcaacaggcagatggaaatccagatgtcccacccccccgtcctcttcaaggcagatcagagcgagagttctttgtcaagtgggtaggactatcctactggcactgctcctgggccaaggagcttcagctggaaatcttccatttggttatgtatcgaaactaccagcggaagaatgacatggatgagcccccacccctggactatggctccggcgaggatgatgggaagagcgacaagcgtaaagtgaaagacccgcactatgctgagatggaggagaagtactatcgttttggcatcaagccagagtggatgaccgtccaccgcatcatcaaccacagtgtggataaaaaggggaattaccactatctagtaaaatggagggacttaccatatgaccagtccacgtgggaggaagatgaaatgaatatccctgaatacgaagaacataagcaaagctactggagacaccgagaactaattatgggggaagaccctgcccagccccgcaagtataagaagaagaagaaggagctacagggtgatgggcctcccagttctcccactaatgatcctaccgtgaaatatgagactcagccacggtttatcacagccactggaggcaccctgcacatgtatcagttggaagggctgaactggctacgcttctcctgggcccagggcactgacaccattctagctgatgagatggggctaggcaagaccatacaaaccatcgtcttcctctactcactctacaaggagggccacacaaaaggtcccttcctggtgagtgccccactctctaccatcattaactgggagcgggagttccagatgtgggcacccaaattctatgtggtgacatacacgggtgacaaggacagccgggccatcattcgtgagaatgaattctcctttgaggacaatgccatcaaagggggcaagaaagcttttaagatgaagagggaggcacaggtgaagttccatgttctcctgacatcgtatgagctgatcaccattgatcaggcagcacttggttccatccgctgggcctgtcttgtggtagatgaggcccatcgactcaagaacaaccagtccaagtttttcagggttctcaatggttacaagatagatcataagttgctgctgacaggaaccccattgcagaataatctggaggagctcttccatctcctgaacttcctcaccccagagagatttaacaacttggagggcttcctggaggagtttgctgacatatccaaagaggaccagatcaagaaactgcatgatttgctggggccacacatgctgcggagactcaaggcagatgtctttaagaacatgccagccaagacagagctcatcgttcgggtggagctaagccccatgcagaagaaatactacaaatacatcctgactcgaaattttgaggccttgaattcacgaggtggtgggaaccaggtgtcgctgcttaatatcatgatggatcttaagaagtgctgcaaccatccatacctttttcccgtggctgctatggagtcccccaaactccccagtggggcttatgagggtggggcacttattaagtcgtctgggaagctcatgctgctccagaagatgctgcgaaagctgaaggagcaaggacaccgagtgctcatcttctcgcagatgaccaaaatgttagacttgcttgaggacttcttagactatgaaggctacaagtatgagcgcatcgatggtggtatcacgggtgccctgaggcaggaggccatcgatcggtttaatgctcctggggcccaacaattctgcttcctcctgtccacccgagctgggggcctgggcatcaatctggccactgctgacactgtcatcatctttgattctgactggaacccccataatgacatccaggcctttagccgggctcatcggattggccaggccaacaaagtgatgatttaccggtttgtgactcgcgcgtcagtggaagagcgaatcacacaagtggccaagagaaagatgatgctgacacacctggttgtgcggcctgggctgggctccaaggcaggctccatgtccaagcaggagcttgacgacattctcaaatttggcactgaagagctattcaaggatgaaaacgagggggagaacaaggaggaggacagcagtgtgattcattatgacaatgaggccatcgctcggctgttggaccggaaccaggatgcaactgaggacactgacgtgcagaacatgaatgagtatctcagctccttcaaggtggcacagtacgtcgtgcgggaagaagacaagattgaggaaattgagcgagagatcatcaagcaggaggagaatgtggaccctgactactgggagaagctgctgaggcatcactatgagcaacagcaggaagacctagcccggaatctaggcaagggcaagcgggttcgcaagcaagttaactacaatgatgctgctcaggaagaccaagacaaccagtcagagtactcggtgggttcagaggaggaggatgaagacttcgatgaacgtcctgaagggcgtagacagtcaaagaggcagctccggaatgagaaagataagccactgcctccactgctggcccgagtcgggggcaacattgaggtgctgggcttcaacacccgtcagcggaaggctttcctcaatgctgtgatgcgctgggggatgccaccacaggatgccttcaccacacagtggctggtgcgggacctgaggggcaagactgagaaggagtttaaggcctatgtgtctttgttcatgcgccatctgtgtgagcctggggcagacggctctgaaacctttgccgatggggtccctcgggagggactgagtcgccagcaggtgttgacccgcattggagtcatgtctctcgtcaaaaagaaggtgcaggagtttgagcacatcaatgggcgttggtcaatgccggaactgatgcctgaccccagcgccgattctaagcgctcctccagagcctcctctcctaccaaaacgtctcccaccactcctgaggcttctgctaccaacagtccctgcacctctaaacctgctactccagctccaagtgagaaaggagaaggcataaggacacctcttgagaaggaggaagctgaaaaccaggaggaaaagccagagaagaacagcagaattggggagaagatggagacagaggctgatgcccccagcccagccccatcacttggggagcggctggagccaaggaagattcctctagaggatgaggtgccaggggtgcctggagagatggagcctgaacctgggtaccgtggggacagagagaagtcagaagatgtaaaaggtgaccgggagcttcgaccagggcctcgagatgagccacggtccaatgggcgacgagaggaaaagacagagaagccccggttcatgttcaatatcgccgatggtggcttcacagagcttcacacactgtggcagaatgaggaacgggcagctatttcctcggggaaactcaatgagatctggcacagaagacatgactattggcttctggctgggattgtcctccatggctatgcacggtggcaggacatccagaatgatgctcaatttgccattatcaacgagccatttaaaactgaagccaataaggggaactttctggagatgaaaaataagttcctggcccggaggttcaagctcctggagcaggcgctggtgattgaggagcagctgcggcgggcggcctacctgaacctgtcgcaggagccggcgcaccccgccatggccctccacgcccgcttcgccgaggccgagtgcctggccgagagccaccagcacctctccaaggagtcgctggcggggaacaagccggccaacgccgtcctgcacaaggttctgaaccagctggaggagttgctgagcgacatgaaggcggacgtgacccgcctgccagccacgctgtcccgaataccccccatcgcagcccgccttcagatgtccgagcgcagcatcctcagccggctggccagcaagggcacggagcctcaccccacaccggcctacccgccgggtccctacgctacacctccggggtacggggcggccttcagcgccgcacccgtaggggccctggccgccgcaggcgccaattacagccagatgcctgcagggtccttcatcacagccgccaccaacggccctccagtgcttgtgaagaaggagaaggaaatggtgggggcattggtgtcagacgggctggatcggaaggagccccgagccggggaggtgatctgtatagacgactga

SEQ ID NO: 242 - DNA, 600 bp, Homo sapiens;
atgtctaacatggagaaacacctgttcaacctgaagttcgcggccaaagaactgagtaggagtgccaaaaaatgcgataaggaggaaaaggccgaaaaggccaaaattaaaaaggccattcagaagggcaacatggaagttgcgaggatacacgccgaaaatgccatccgccagaagaaccaggcggtgaatttcttgagaatgagtgcgcgagtcgatgcagtggctgccagggtccagacggcggtgacgatgggcaaggtgaccaagtcgatggctggtgtggttaagtcgatggatgcgacattgaagaccatgaatctggagaagatttctgctttgatggacaaattcgagcaccagtttgagactctggacgtccagacgcagcaaatggaagacacgatgagcagcacgacgacgctcaccactccccagaaccaagtggatatgctgctccaggaaatggcagatgaggcgggcctcgacctcaacatggagctgccgcagggccagaccggctccgtgggcacgagcgtggcttcggcggagcaggatgaactgtctcagagactggcccgccttcgggatcaagtgtga

SEQ ID NO: 243 - DNA, 1362 bp, Homo sapiens;
atgtggtccccggagcgggaggccgaggccccagccgggggagacccggcgggccttctgccccccgagtgggaggaggacgaggagcgcatgtccttcctgttctccgctttcaagaggagtcgcgaggtgaacagcaccgactgggacagcaagatgggcttctgggcgccgttggtgctgagccacagccgccgccagggggtggtgcgcctgcgtctgcgggacttgcaggaggcctttcagcgcaaggggagcgtcccgctggggctggccacggtgctgcaggacctgctgcgtcgaggggagctgcagcgggagtcagacttcatggccagtgtagacagcagctggatctcctggggggttggggtcttcctgctgaagcctctcaagtggactctttctaacatgctgggagataataaggttccagctgaggaggtccttgtcgctgtggagctgttgaaggaaaaggctgaggaggtgtatcgtctgtatcagaactcgcccctctcctcccaccccgtggtggccctgtcagagctcagcaccctctgtgctaactcctgcccagatgagaggaccttctacttggtgttgctgcagctgcagaaggagaagagggtcacagtcctcgagcagaacggggagaagattgtgaagtttgcccgagggccacgtgccaaggtctctccagtcaatgacgtagatgttggggtgtaccagctgatgcagagtgaacagcttctctcacgcaaagtggagtccttatcccaggaagcagagaggtgtaaagaagaagcccgccgggcatgccgagcaggaaagaagcagctggcactgaggtctctcaaggccaagcaacggacagagaagcgcatcgaggccttgcatgccaagctggacactgttcaaggcatcctggaccggatctatgcctcccagacagatcagatggtttttaacgcctaccaggctggggtaggagcactcaaactctccatgaaggatgtcacagtggagaaggcagagagcctcgtggatcagatccaagagctctgtgacacccaggatgaagtttctcagactctggctggtggggtaacaaatggcttagattttgacagtgaagaactggagaaggaattggacatcctccttcaggataccaccaaagaacctttggatctgcctgacaacccccgcaataggcattttaccaacagcgtgcctaaccctaggatctcagatgctgaacttgaagctgaacttgagaaactgtccttatcagagggaggtttggtcccaagcagtaaatctccaaaaaggcaattggaaccgactctaaagccattgtag

SEQ ID NO: 244 - DNA, 1059 bp, Homo sapiens;
atgaagccagcgctgctggaagtgatgaggatgaacagaatctgccggatggtgctggccacttgcttgggatcctttatcctggtcatcttctatttccaaagtatgttgcacccagtcatgcggaggaatccctttggtgtggacatctgctgccggaaggggtcccgaagccccctgcaggaactctacaacccaatccagctggagctctcaaacactgctgtcctgcaccagatgcggcgggaccaggtgacagacacgtgccgagccaacagcgccacaagccgtaagcggagggtgctgacccccaacgacctgaagcacttggtggtggatgaggaccacgagctcatctactgctacgtgcccaaggtggcctgcaccaactggaagcggctcatgatggtcctgaccgggcgggggaagtacagcgaccccatggagatcccggccaacgaggcacacgtctccgccaacctgaagaccctgaaccagtacagcatcccagaaatcaaccaccgcttgaaaagctacatgaagttcctgtttgtccgggagcccttcgagaggctagtgtccgcctaccgcaacaagttcacccagaagtacaacatctccttccacaagcggtacggcaccaagatcatcaaacgccagcggaagaacgccacccaggaggccctgcgcaaaggggacgatgtcaaattcgaggagtttgtggcctatctcatcgacccacacacccagcgggaggagcctttcaacgaacactggcaaaccgtctactcactctgccatccctgccacatccactatgacctcgtgggcaagtacgagacactggaagaggattctaattacgtcctgcagctggcaggagtgggcagctacctgaagttccccacctatgcaaagtctacgagaactactgatgaaatgaccacagaattcttccagaacatcagctcagagcaccaaacgcagctgtacgaagtctacaaactcgattttttaatgttcaattactcagtgccaagctacctgaaattggaataa

SEQ ID NO: 245 - DNA, 939 bp, Homo sapiens;
atggcagattttgggatctctgctggccagtttgtggcagtggtctgggataagtcatccccagtggaggctctgaaaggtctggtggataagcttcaagcgttaaccggcaatgagggccgcgtgtctgtggaaaacatcaagcagctgttgcaatctgcccacaaagaatccagctttgacattattttgtcaggtttagtcccaggaagcaccactctgcacagtgctgagattttggctgaaatcgcccggatccttcggcctggtggatgtctttttctgaaggagccagtagagacagctgtagataacaatagcaaagtgaagacagcatctaagctgtgttcagccctgactctttctggtcttgtggaagtgaaagagctgcagcgggagcccctaacccctgaggaagtacagtctgttcgagaacaccttggtcatgaaagtgacaacctgctgtttgttcagatcacaggcaaaaaaccaaactttgaagtgggttcttctaggcagcttaagctttccatcaccaagaagtcttctccttcagtgaaacctgctgtggaccctgctgctgccaagctgtggaccctctcagccaacgatatggaggacgacagcatggatctcattgactcagatgagctgctggatccagaagatttgaagaagccagatccagcttccctgcgggctgcttcttgtggggaagggaaaaagaggaaggcctgtaagaactgcacctgtggccttgccgaagaactggaaaaagagaagtcaagggaacagatgagctcccaacccaagtcagcttgtggaaactgctacctgggcgatgccttccgctgtgccagctgcccctaccttgggatgccagccttcaaacctggggaaaaggtgcttctgagtgatagcaatcttcatgatgcctag

SEQ ID NO: 246 - DNA, 714 bp, Homo sapiens;
atgacttcggaaatcacttatgctgaagtgaggttcaaaaatgaattcaagtcctcaggcatcaacacagcctcttctgcagcttccaaggagaggactgcccctcacaaaagtaataccggattccccaagctgctttgtgcctcactgttgatatttttcctgctattggcaatctcattctttattgcttttgtcattttctttcaaaaatattctcagcttcttgaaaaaaagactacaaaagagctggttcatacaacattggagtgtgtgaaaaaaaatatgcccgtggaagagacagcctggagctgttgcccaaagaattggaagtcatttagttccaactgctactttatttctactgaatcagcatcttggcaagacagtgagaaggactgtgctagaatggaggctcacctgctggtgataaacactcaagaagagcaggatttcatcttccagaatctgcaagaagaatctgcttattttgtggggctctcagatccagaaggtcagcgacattggcaatgggttgatcagacaccatacaatgaaagttccacattctggcatccacgtgagcccagtgatcccaatgagcgctgcgttgtgctaaattttcgtaaatcacccaaaagatggggctggaatgatgttaattgtcttggtcctcaaaggtcagtttgtgagatgatgaagatccacttatga

SEQ ID NO: 247 - DNA, 1446 bp, Homo sapiens;
atgcggcattccaaaagaactcactgtcctgattgggatagcagagaaagctggggacatgaaagctatcgtggaagtcacaagcggaagaggagatctcatagtagcacacaagagaacaggcattgtaaaccacatcaccagtttaaagaatctgattgtcattatttagaagcaaggtccttgaatgagcgagattatcgggaccggagatacgttgacgaatacaggaatgactactgtgaaggatatgttcctagacattatcacagagacattgaaagcgggtatcgaatccactgcagtaaatcttcagtccgcagcaggagaagcagtcctaaaaggaagcgcaatagacactgttcaagtcatcagtcacgttcgaagagccaccgaaggaaaagatccaggagtatagaggatgatgaggagggtcacctgatctgtcaaagtggagacgttctaagagcaagatatgaaatcgtggacactttgggtgaaggagcctttggcaaagttgtagagtgcattgatcatggcatggatggcatgcatgtagcagtgaaaatcgtaaaaaatgtaggccgttaccgtgaagcagctcgttcagaaatccaagtattagagcacttaaatagtactgatcccaatagtgtcttccgatgtgtccagatgctagaatggtttgatcatcatggtcatgtttgtattgtgtttgaactactgggacttagtacttacgatttcattaaagaaaacagctttctgccatttcaaattgaccacatcaggcagatggcgtatcagatctgccagtcaataaattttttacatcataataaattaacccatacagatctgaagcctgaaaatattttgtttgtgaagtctgactatgtagtcaaatataattctaaaatgaaacgtgatgaacgcacactgaaaaacacagatatcaaagttgttgactttggaagtgcaacgtatgatgatgaacatcacagtactttggtgtctacccggcactacagagctcccgaggtcattttggctttaggttggtctcagccttgtgatgtttggagcataggttgcattcttattgaatattaccttggtttcacagtctttcagactcatgatagtaaagagcacctggcaatgatggaacgaatattaggacccataccacaacacatgattcagaaaacaagaaaacgcaagtattttcaccataaccagctagattgggatgaacacagttctgctggtagatatgttaggagacgctgcaaaccgttgaaggaatttatgctttgtcatgatgaagaacatgagaaactgtttgacctggttcgaagaatgttagaatatgatccaactcaaagaattaccttggatgaagcattgcagcatcctttctttgacttattaaaaaagaaatga

SEQ ID NO: 248 - DNA, 837 bp, Homo sapiens;
atggattcaatgcctgagcccgcgtcccgctgtcttctgcttcttcccttgctgctgctgctgctgctgctgctgccggccccggagctgggcccgagccaggccggagctgaggagaacgactgggttcgcctgcccagcaaatgcgaagtgtgtaaatatgttgctgtggagctgaagtcagcctttgaggaaaccggcaagaccaaggaggtgattggcacgggctatggcatcctggaccagaaggcctctggagtcaaatacaccaagtcggacttgcggttaatcgaagtcactgagaccatttgcaagaggctcctggattatagcctgcacaaggagaggaccggcagcaatcgatttgccaagggcatgtcagagacctttgagacattacacaacctggtacacaaaggggtcaaggtggtgatggacatcccctatgagctgtggaacgagacttctgcagaggtggctgacctcaagaagcagtgtgatgtgctggtggaagagtttgaggaggtgatcgaggactggtacaggaaccaccaggaggaagacctgactgaattcctctgcgccaaccacgtgctgaagggaaaagacaccagttgcctggcagagcagtggtccggcaagaagggagacacagctgccctgggagggaagaagtccaagaagaagagcagcagggccaaggcagcaggcggcaggagtagcagcagcaaacaaaggaaggagctgggtggccttgagggagaccccagccccgaggaggatgagggcatccagaaggcatcccctctcacacacagcccccctgatgagctctga

SEQ ID NO: 249 - DNA, 984 bp, Homo sapiens;
atgaccatggaatctggagccgagaaccagcagagtggagatgcagctgtaacagaagctgaaaaccaacaaatgacagttcaagcccagccacagattgccacattagcccaggtatctatgccagcagctcatgcaacatcatctgctcccaccgtaactctagtacagctgcccaatgggcagacagttcaagtccatggagtcattcaggcggcccagccatcagttattcagtctccacaagtccaaacagttcagatttcaactattgcagaaagtgaagattcacaggagtcagtggatagtgtaactgattcccaaaagcgaagggaaattctttcaaggaggccttcctacaggaaaattttgaatgacttatcttctgatgcaccaggagtgccaaggattgaagaagagaagtctgaagaggagacttcagcacctgccatcaccactgtaacggtgccaactccaatttaccaaactagcagtggacagtatattgccattacccagggaggagcaatacagctggctaacaatggtaccgatggggtacagggcctgcaaacattaaccatgaccaatgcagcagccactcagccgggtactaccattctacagtatgcacagaccactgatggacagcagatcttagtgcccagcaaccaagttgttgttcaagctgcctctggagacgtacaaacataccagattcgcacagcacccactagcactattgcccctggagttgttatggcatcctccccagcacttcctacacagcctgctgaagaagcagcacgaaagagagaggtccgtctaatgaagaacagggaagcagctcgagagtgtcgtagaaagaagaaagaatatgtgaaatgtttagaaaacagagtggcagtgcttgaaaatcaaaacaagacattgattgaggagctaaaagcacttaaggacctttactgccacaaatcagattaa

SEQ ID NO: 250 - DNA, 7329 bp, Homo sapiens;
atggctgagaacttgctggacggaccgcccaaccccaaaagagccaaactcagctcgcccggtttctcggcgaatgacagcacagattttggatcattgtttgacttggaaaatgatcttcctgatgagctgatacccaatggaggagaattaggccttttaaacagtgggaaccttgttccagatgctgcttccaaacataaacaactgtcggagcttctacgaggaggcagcggctctagtatcaacccaggaataggaaatgtgagcgccagcagccccgtgcagcagggcctgggtggccaggctcaagggcagccgaacagtgctaacatggccagcctcagtgccatgggcaagagccctctgagccagggagattcttcagcccccagcctgcctaaacaggcagccagcacctctgggcccacccccgctgcctcccaagcactgaatccgcaagcacaaaagcaagtggggctggcgactagcagccctgccacgtcacagactggacctggtatctgcatgaatgctaactttaaccagacccacccaggcctcctcaatagtaactctggccatagcttaattaatcaggcttcacaagggcaggcgcaagtcatgaatggatctcttggggctgctggcagaggaaggggagctggaatgccgtaccctactccagccatgcagggcgcctcgagcagcgtgctggctgagaccctaacgcaggtttccccgcaaatgactggtcacgcgggactgaacaccgcacaggcaggaggcatggccaagatgggaataactgggaacacaagtccatttggacagccctttagtcaagctggagggcagccaatgggagccactggagtgaacccccagttagccagcaaacagagcatggtcaacagtttgcccaccttccctacagatatcaagaatacttcagtcaccaacgtgccaaatatgtctcagatgcaaacatcagtgggaattgtacccacacaagcaattgcaacaggccccactgcagatcctgaaaaacgcaaactgatacagcagcagctggttctactgcttcatgctcataagtgtcagagacgagagcaagcaaacggagaggttcgggcctgctcgctcccgcattgtcgaaccatgaaaaacgttttgaatcacatgacgcattgtcaggctgggaaagcctgccaagttgcccattgtgcatcttcacgacaaatcatctctcattggaagaactgcacacgacatgactgtcctgtttgcctccctttgaaaaatgccagtgacaagcgaaaccaacaaaccatcctggggtctccagctagtggaattcaaaacacaattggttctgttggcacagggcaacagaatgccacttctttaagtaacccaaatcccatagaccccagctccatgcagcgagcctatgctgctctcggactcccctacatgaaccagccccagacgcagctgcagcctcaggttcctggccagcaaccagcacagcctcaaacccaccagcagatgaggactctcaaccccctgggaaataatccaatgaacattccagcaggaggaataacaacagatcagcagcccccaaacttgatttcagaatcagctcttccgacttccctgggggccacaaacccactgatgaacgatggctccaactctggtaacattggaaccctcagcactataccaacagcagctcctccttctagcaccggtgtaaggaaaggctggcacgaacatgtcactcaggacctgcggagccatctagtgcataaactcgtccaagccatcttcccaacacctgatcccgcagctctaaaggatcgccgcatggaaaacctggtagcctatgctaagaaagtggaaggggacatgtacgagtctgccaacagcagggatgaatattatcacttattagcagagaaaatctacaagatacaaaaagaactagaagaaaaacggaggtcgcgtttacataaacaaggcatcttggggaaccagccagccttaccagccccgggggctcagccccctgtgattccacaggcacaacctgtgagacctccaaatggacccctgtccctgccagtgaatcgcatgcaagtttctcaagggatgaattcatttaaccccatgtccttggggaacgtccagttgccacaagcacccatgggacctcgtgcagcctccccaatgaaccactctgtccagatgaacagcatgggctcagtgccagggatggccatttctccttcccgaatgcctcagcctccgaacatgatgggtgcacacaccaacaacatgatggcccaggcgcccgctcagagccagtttctgccacagaaccagttcccgtcatccagcggggcgatgagtgtgggcatggggcagccgccagcccaaacaggcgtgtcacagggacaggtgcctggtgctgctcttcctaaccctctcaacatgctggggcctcaggccagccagctaccttgccctccagtgacacagtcaccactgcacccaacaccgcctcctgcttccacggctgctggcatgccatctctccagcacacgacaccacctgggatgactcctccccagccagcagctcccactcagccatcaactcctgtgtcgtcttccgggcagactcccaccccgactcctggctcagtgcccagtgctacccaaacccagagcacccctacagtccaggcagcagcccaggcccaggtgaccccgcagcctcaaaccccagttcagcccccgtctgtggctacccctcagtcatcgcagcaacagccgacgcctgtgcacgcccagcctcctggcacaccgctttcccaggcagcagccagcattgataacagagtccctaccccctcctcggtggccagcgcagaaaccaattcccagcagccaggacctgacgtacctgtgctggaaatgaagacggagacccaagcagaggacactgagcccgatcctggtgaatccaaaggggagcccaggtctgagatgatggaggaggatttgcaaggagcttcccaagttaaagaagaaacagacatagcagagcagaaatcagaaccaatggaagtggatgaaaagaaacctgaagtgaaagtagaagttaaagaggaagaagagagtagcagtaacggcacagcctctcagtcaacatctccttcgcagccgcgcaaaaaaatctttaaaccagaggagttacgccaggccctcatgccaaccctagaagcactgtatcgacaggacccagagtcattacctttccggcagcctgtagatccccagctcctcggaattccagactattttgacatcgtaaagaatcccatggacctctccaccatcaagcggaagctggacacagggcaataccaagagccctggcagtacgtggacgacgtctggctcatgttcaacaatgcctggctctataatcgcaagacatcccgagtctataagttttgcagtaagcttgcagaggtctttgagcaggaaattgaccctgtcatgcagtcccttggatattgctgtggacgcaagtatgagttttccccacagactttgtgctgctatgggaagcagctgtgtaccattcctcgcgatgctgcctactacagctatcagaataggtatcatttctgtgagaagtgtttcacagagatccagggcgagaatgtgaccctgggtgacgacccttcacagccccagacgacaatttcaaaggatcagtttgaaaagaagaaaaatgataccttagaccccgaacctttcgttgattgcaaggagtgtggccggaagatgcatcagatttgcgttctgcactatgacatcatttggccttcaggttttgtgtgcgacaactgcttgaagaaaactggcagacctcgaaaagaaaacaaattcagtgctaagaggctgcagaccacaagactgggaaaccacttggaagaccgagtgaacaaatttttgcggcgccagaatcaccctgaagccggggaggtttttgtccgagtggtggccagctcagacaagacggtggaggtcaagcccgggatgaagtcacggtttgtggattctggggaaatgtctgaatctttcccatatcgaaccaaagctctgtttgcttttgaggaaattgacggcgtggatgtctgcttttttggaatgcacgtccaagaatacggctctgattgcccccctccaaacacgaggcgtgtgtacatttcttatctggatagtattcatttcttccggccacgttgcctccgcacagccgtttaccatgagatccttattggatatttagagtatgtgaagaaattagggtatgtgacagggcacatctgggcctgtcctccaagtgaaggagatgattacatcttccattgccacccacctgatcaaaaaatacccaagccaaaacgactgcaggagtggtacaaaaagatgctggacaaggcgtttgcagagcggatcatccatgactacaaggatattttcaaacaagcaactgaagacaggctcaccagtgccaaggaactgccctattttgaaggtgatttctggcccaatgtgttagaagagagcattaaggaactagaacaagaagaagaggagaggaaaaaggaagagagcactgcagccagtgaaaccactgagggcagtcagggcgacagcaagaatgccaagaagaagaacaacaagaaaaccaacaagaacaaaagcagcatcagccgcgccaacaagaagaagcccagcatgcccaacgtgtccaatgacctgtcccagaagctgtatgccaccatggagaagcacaaggaggtcttcttcgtgatccacctgcacgctgggcctgtcatcaacaccctgccccccatcgtcgaccccgaccccctgctcagctgtgacctcatggatgggcgcgacgccttcctcaccctcgccagagacaagcactgggagttctcctccttgcgccgctccaagtggtccacgctctgcatgctggtggagctgcacacccagggccaggaccgctttgtctacacctgcaacgagtgcaagcaccacgtggagacgcgctggcactgcactgtgtgcgaggactacgacctctgcatcaactgctataacacgaagagccatgcccataagatggtgaagtgggggctgggcctggatgacgagggcagcagccagggcgagccacagtcaaagagcccccaggagtcacgccggctgagcatccagcgctgcatccagtcgctggtgcacgcgtgccagtgccgcaacgccaactgctcgctgccatcctgccagaagatgaagcgggtggtgcagcacaccaagggctgcaaacgcaagaccaacgggggctgcccggtgtgcaagcagctcatcgccctctgctgctaccacgccaagcactgccaagaaaacaaatgccccgtgcccttctgcctcaacatcaaacacaagctccgccagcagcagatccagcaccgcctgcagcaggcccagctcatgcgccggcggatggccaccatgaacacccgcaacgtgcctcagcagagtctgccttctcctacctcagcaccgcccgggacccccacacagcagcccagcacaccccagacgccgcagccccctgcccagccccaaccctcacccgtgagcatgtcaccagctggcttccccagcgtggcccggactcagccccccaccacggtgtccacagggaagcctaccagccaggtgccggcccccccacccccggcccagccccctcctgcagcggtggaagcggctcggcagatcgagcgtgaggcccagcagcagcagcacctgtaccgggtgaacatcaacaacagcatgcccccaggacgcacgggcatggggaccccggggagccagatggcccccgtgagcctgaatgtgccccgacccaaccaggtgagcgggcccgtcatgcccagcatgcctcccgggcagtggcagcaggcgccccttccccagcagcagcccatgccaggcttgcccaggcctgtgatatccatgcaggcccaggcggccgtggctgggccccggatgcccagcgtgcagccacccaggagcatctcacccagcgctctgcaagacctgctgcggaccctgaagtcgcccagctcccctcagcagcaacagcaggtgctgaacattctcaaatcaaacccgcagctaatggcagctttcatcaaacagcgcacagccaagtacgtggccaatcagcccggcatgcagccccagcctggcctccagtcccagcccggcatgcaaccccagcctggcatgcaccagcagcccagcctgcagaacctgaatgccatgcaggctggcgtgccgcggcccggtgtgcctccacagcagcaggcgatgggaggcctgaacccccagggccaggccttgaacatcatgaacccaggacacaaccccaacatggcgagtatgaatccacagtaccgagaaatgttacggaggcagctgctgcagcagcagcagcaacagcagcagcaacaacagcagcaacagcagcagcagcaagggagtgccggcatggctgggggcatggcggggcacggccagttccagcagcctcaaggacccggaggctacccaccggccatgcagcagcagcagcgcatgcagcagcatctccccctccagggcagctccatgggccagatggcggctcagatgggacagcttggccagatggggcagccggggctgggggcagacagcacccccaacatccagcaagccctgcagcagcggattctgcagcaacagcagatgaagcagcagattgggtccccaggccagccgaaccccatgagcccccagcaacacatgctctcaggacagccacaggcctcgcatctccctggccagcagatcgccacgtcccttagtaaccaggtgcggtctccagcccctgtccagtctccacggccccagtcccagcctccacattccagcccgtcaccacggatacagccccagccttcgccacaccacgtctcaccccagactggttccccccaccccggactcgcagtcaccatggccagctccatagatcagggacacttggggaaccccgaacagagtgcaatgctcccccagctgaacacccccagcaggagtgcgctgtccagcgaactgtccctggtcggggacaccacgggggacacgctagagaagtttgtggagggcttgtag

SEQ ID NO: 251 - DNA, 1329 bp, Homo sapiens;
atgaggggggcgatggagctggagcctgagctgctgttgcaggaggcccgcgagaacgtggaggcagcgcagagctaccggcgggagctgggtcaccggcttgaggggctgcgtgaggcgcggaggcagatcaaagaaagtgcatcacagacaagggatgttctcaaacagcattttaatgatttaaagggaacccttggaaagctcctggatgagcgattggtgacccttttgcaagaggtggacaccattgaacaggagaccattaaaccactagatgactgccagaagctcatagaacacggagtcaacactgcagaggacttagtccgagaaggtgaaatcgccatgcttggtggtgtgggagaagagaatgagaaactgtggagctttaccaaaaaggcctcgcacattcagttggacagcttaccagaagtacctttactggttgatgtgccttgtttatctgctcagttggatgactcaattcttaacatagtgaaagaccacatttttaagcatggaacagtagcatctcgcccaccagtacagatagaagaactaatagagaaacctggaggcatcattgtacgatggtgtaaggtggatgatgactttacagcccaagattacaggctccagtttcgtaaatgtacttcaaatcattttgaggatgtatatgtaggttctgaaactgaattcatagtattgcacatagaccccaacgttgattaccagttcagagtctgcgcccgaggagatggccgacaggagtggagtccttggagtgtcccccagataggtcattccacattggtgcctcatgagtggacagctggttttgaggggtacagtctgagcagtcgaagaaatatagcacttcggaacgattctgaatcatcgggtgttctctactccagagctccgacttatttctgtgggcagacattaacattcagagttgaaactgtgggacagccagacagaagagatagcataggagtgtgtgcagaaaaacaggatggatatgactctctgcagcgggatcaagctgtgtgcattagtacaaatggtgcagtttttgtcaatggaaaagaaatgacaaatcagttacccgcagttacttctgggtccactgtcacgtttgacattgaagccgtgactctaggaaccaccagtaataatgaaggtggacacttcaagcttcgagtaactataagttcaaataatagagaagtggtttttgactggttacttgatcagtcttgtggttctctttactttggatgctcatttttctatcctggatggaaagtgttagtgttttag

SEQ ID NO: 252 - DNA, 1860 bp, Homo sapiens;
atggccgcctcgccgggctcgggcagcgccaacccgcggaagttcagtgagaagatcgcgctgcacacgcagagacaggccgaggagacgcgggccttcgagcagctcatgaccgacctcaccctgtcgcgggttcaatttcagaagcttcagcaactgcgccttacacagtaccatggaggatccttaccaaatgtgagccagctgcggagcagtgcgtcagagtttcagccgtcatttcaccaagctgataatgttcggggaacccgccatcacgggctggtggagaggccatccaggaaccgcttccaccccctccaccgaaggtctggggacaagccagggcgacaatttgatggtagtgcttttggagccaattattcctcacagcctctggatgagagttggccaaggcagcagcctccttggaaagacgaaaagcatcctgggttcaggctgacatctgcacttaacaggaccaattctgattctgctcttcacacgagtgctctgagtaccaagccccaggacccctatggaggagggggccagtcggcctggcctgccccatacatgggtttctgtgatggtgagaataatggacatggggaagtagcatctttccctggcccattgaaagaagagaatctgttaaatgttccgaagccactgccaaaacaactgtgggagaccaaggagattcagtccctgtcaggacgccctcgatcctgtgatgttggaggtggcaatgcttttccacataatggtcaaaacctaggcctctcacccttcttggggaccttgaacactggagggtcattgccagatctaaccaacctccactactcgacacccctgccagcctccctggacaccaccgaccaccactttggcagtatgagtgtggggaatagtgtgaacaacatcccagctgctatgacccacctgggtataagaagctcctctggtctccagagttctcggagtaacccctccatccaagccacgctcaataagactgtgctttcctcttccttaaataaccacccacagacatctgttcccaacgcatctgctcttcacccttcgctccgtctgttttcccttagcaacccatctctttccaccacaaacctgagcggcccgtctcggcgtcggcagcctcccgtcagccctctcacgctttctcctggccctgaagcacatcaaggtttcagcagacagctgtcttcaaccagcccactggccccatatcctacctcccagatggtgtcctcagaccgaagccaactttcctttctgcccacagaagctcaagcccaggtgtcgccgccacccccttaccctgcaccccaggagctcacccagcccctcctgcagcagccccgcgcccctgaggcccctgcccagcagccccaggcagcctcctcactgccacagtcagactttcagcttctcccggcccagggctcatctttgaccaacttcttcccagatgtgggttttgaccagcagtccatgaggccaggccctgcctttcctcaacaggtgcctctggtgcaacaaggttcccgagaactgcaggactcttttcatttgagaccaagcccgtattccaactgcgggagtctcccgaacaccatcctgccagaagactccagcaccagcctgttcaaagacctcaacagtgcgctggcaggcctgcctgaggtcagcctgaacgtggacactccatttccactggaagaggagctgcagattgaacccctgagcctggacggactcaacatgttaagtgactccagcatgggcctgctggacccctctgttgaagagacgtttcgagctgacagactgtga

SEQ ID NO: 253 - DNA, 1563 bp, Homo sapiens;
atgtcaattccactgaagtcctcatttctgctgagctacctgtgcaccctgcctccggctctcctgagcagagagatcctgatggctgactcagaagcactcccctcccttgctggggacccagtggctgtggaagccttgctccgggccgtgtttggggttgttgtggatgaggccattcagaaaggaaccagtgtctcccagaaggtctgtgagtggaaggagcctgaggagctgaagcagctgctggatttggagctgcggagccagggcgagtcacagaagcagatcctggagcggtgtcgggctgtgattcgctacagtgtcaagactggtcaccctcggttcttcaaccagctcttctctgggttggatccccatgctctggccgggcgcattatcactgagagcctcaacaccagccagtacacatatgaaatcgcccccgtgtttgtgctcatggaagaggaggtgctgaggaaactgcgggccctggtgggctggagctctggggacggaatcttctgccctggtggctccatctccaacatgtatgctgtaaatctggcccgctatcagcgctacccggattgcaagcagaggggcctccgcacactgccgcccctggccctattcacatcgaaggagtgtcactactccatccagaagggagctgcgtttctgggacttggcaccgacagtgtccgagtggtcaaggctgatgagagagggaaaatggtccccgaggatctggagaggcagattggtatggccgaggctgagggtgctgtgccgttcctggtcagtgccacctctggcaccactgtgctaggggcctttgaccccctggaggcaattgctgatgtgtgccagcgtcatgggctatggctgcatgtggatgctgcctggggtgggagcgtcctgctgtcacagacacacaggcatctcctggatgggatccagagggctgactctgtggcctggaatccccacaagctcctcgcagcaggcctgcaatgctctgcacttcttctccaggatacctcgaacctgctcaagcgctgccatgggtcccaggccagctaccttttccagcaggacaagttctacgatgtggctctggacacgggagacaaggtggtgcagtgtggccgccgtgtggactgtctgaagctgtggctcatgtggaaggcacagggcgatcaagggctggagcggcgcatcgaccaggcctttgtccttgcccggtacctggtggaggaaatgaagaagcgggaagggtttgagctagtcatggagcctgagtttgtcaatgtgtgtttctggttcgtaccccccagcctgcgagggaagcaggagagtccagattaccacgaaaggctgtcaaaggtggcccccgtgctcaaggagcgcatggtgaaggagggctccatgatgattggctaccagccccacgggacccggggcaacttcttccgtgtggttgtggccaactctgcactgacctgtgctgatatggacttcctcctcaacgagctggagcggctaggccaggacctgtga

SEQ ID NO: 254 - DNA, 2694 bp, Homo sapiens;
atggtgctggcccaggggctgctctccatggccctgctggccctgtgctgggagcgcagcctggcaggggcagaagaaaccatcccgctgcagaccctgcgctgctacaacgactacaccagccacatcacctgcaggtgggcagacacccaggatgcccagcggctcgtcaacgtgaccctcattcgccgggtgaatgaggacctcctggagccagtgtcctgtgacctcagtgatgacatgccctggtcagcctgcccccatccccgctgcgtgcccaggagatgtgtcattccctgccagagttttgtcgtcactgacgttgactacttctcattccaaccagacaggcctctgggcacccggctcaccgtcactctgacccagcatgtccagcctcctgagcccagggacctgcagatcagcaccgaccaggaccacttcctgctgacctggagtgtggcccttgggagtccccagagccactggttgtccccaggggatctggagtttgaggtggtctacaagcggcttcaggactcttgggaggacgcagccatcctcctctccaacacctcccaggccaccctggggccagagcacctcatgcccagcagcacctacgtggcccgagtacggacccgcctggccccaggttctcggctctcaggacgtcccagcaagtggagcccagaggtttgctgggactcccagccaggggatgaggcccagccccagaacctggagtgcttctttgacggggccgccgtgctcagctgctcctgggaggtgaggaaggaggtggccagctcggtctcctttggcctattctacaagcccagcccagatgcaggggaggaagagtgctccccagtgctgagggaggggctcggcagcctccacaccaggcaccactgccagattcccgtgcccgaccccgcgacccacggccaatacatcgtctctgttcagccaaggagggcagagaaacacataaagagctcagtgaacatccagatggcccctccatccctcaacgtgaccaaggatggagacagctacagcctgcgctgggaaacaatgaaaatgcgatacgaacacatagaccacacatttgagatccagtacaggaaagacacggccacgtggaaggacagcaagaccgagaccctccagaacgcccacagcatggccctgccagccctggagccctccaccaggtactgggccagggtgagggtcaggacctcccgcaccggctacaacgggatctggagcgagtggagtgaggcgcgctcctgggacaccgagtcggtgctgcctatgtgggtgctggccctcatcgtgatcttcctcaccatcgctgtgctcctggccctccgcttctgtggcatctacgggtacaggctgcgcagaaagtgggaggagaagatccccaaccccagcaagagccacctgttccagaacgggagcgcagagctttggcccccaggcagcatgtcggccttcactagcgggagtcccccacaccaggggccgtggggcagccgcttccctgagctggagggggtgttccctgtaggattcggggacagcgaggtgtcacctctcaccatagaggaccccaagcatgtctgtgatccaccatctgggcctgacacgactccagctgcctcagatctacccacagagcagccccccagcccccagccaggcccgcctgccgcctcccacacacctgagaaacaggcttccagctttgacttcaatgggccctacctggggccgccccacagccgctccctacctgacatcctgggccagccggagcccccacaggagggtgggagccagaagtccccacctccagggtccctggagtacctgtgtctgcctgctggggggcaggtgcaactggtccctctggcccaggcgatgggaccaggacaggccgtggaagtggagagaaggccgagccagggggctgcagggagtccctccctggagtccgggggaggccctgcccctcctgctcttgggccaagggtgggaggacaggaccaaaaggacagccctgtggctatacccatgagctctggggacactgaggaccctggagtggcctctggttatgtctcctctgcagacctggtattcaccccaaactcaggggcctcgtctgtctccctagttccctctctgggcctcccctcagaccagacccccagcttatgtcctgggctggccagtggaccccctggagccccaggccctgtgaagtcagggtttgagggctatgtggagctccctccaattgagggccggtcccccaggtcaccaaggaacaatcctgtcccccctgaggccaaaagccctgtcctgaacccaggggaacgcccggcagatgtgtccccaacatccccacagcccgagggcctccttgtcctgcagcaagtgggcgactattgcttcctccccggcctggggcccggccctctctcgctccggagtaaaccttcttccccgggacccggtcctgagatcaagaacctagaccaggcttttcaagtcaagaagcccccaggccaggctgtgccccaggtgcccgtcattcagctcttcaaagccctgaagcagcaggactacctgtctctgcccccttgggaggtcaacaagcctggggaggtgtgttga

SEQ ID NO: 255 - DNA, 1248 bp, Homo sapiens;
atggagctgagagtcgggaacaggtaccggctgggccggaagatcggcagcggctccttcggagacatctatctcggtacggacattgctgcaggagaagaggttgccatcaagcttgaatgtgtcaaaaccaaacaccctcagctccacattgagagcaaaatctacaagatgatgcagggaggagtgggcatccccaccatcagatggtgcggggcagagggggactacaacgtcatggtgatggagctgctggggccaagcctggaggacctcttcaacttctgctccaggaaattcagcctcaaaaccgtcctgctgcttgctgaccaaatgatcagtcgcatcgaatacattcattcaaagaacttcatccaccgggatgtgaagccagacaacttcctcatgggcctggggaagaagggcaacctggtgtacatcatcgacttcgggctggccaagaagtaccgggatgcacgcacccaccagcacatcccctatcgtgagaacaagaacctcacggggacggcgcggtacgcctccatcaacacgcaccttggaattgaacaatcccgaagagatgacttggagtctctgggctacgtgctaatgtacttcaacctgggctctctcccctggcaggggctgaaggctgccaccaagagacagaaatacgaaaggattagcgagaagaaaatgtccacccccatcgaagtgttgtgtaaaggctacccttccgaatttgccacatacctgaatttctgccgttccttgcgttttgacgacaagcctgactactcgtacctgcggcagcttttccggaatctgttccatcgccagggcttctcctatgactacgtgttcgactggaacatgctcaaatttggtgccagccgggccgccgatgacgccgagcgggagcgcagggaccgagaggagcggctgagacactcgcggaacccggctacccgcggcctcccttccacagcctccggccgcctgcgggggacgcaggaagtggctccccccacacccctcacccctacctcacacacggctaacacctccccccggcccgtctccggcatggagagagagcggaaagtgagtatgcggctgcaccgcggggcccccgtcaacatctcctcgtccgacctcacaggccgacaagatacctctcgcatgtccacctcacagattcctggtcgggtggcttccagtggtcttcagtctgtcgtgcaccgatga

SEQ ID NO: 256 - DNA, 441 bp, Homo sapiens;
atggccgggcccctgcgcgccccgctgctcctgctggccatcctggccgtggccctggccgtgagccccgcggccggctccagtcccggcaagccgccgcgcctagtgggaggccccatggacgccagcgtggaggaggagggtgtgcggcgtgcactggactttgccgtcggcgagtacaacaaagccagcaacgacatgtaccacagccgcgcgctgcaggtggtgcgcgcccgcaagcagatcgtagctggggtgaactacttcttggacgtggagctgggccgaaccacgtgtaccaagacccagcccaacttggacaactgccccttccatgaccagccacatctgaaaaggaaagcattctgctctttccagatctacgctgtgccttggcagggcacaatgaccttgtcgaaatccacctgtcaggacgcctag

SEQ ID NO: 257 - DNA, 1338 bp, Homo sapiens;
atggcccttgtggataagcacaaagtcaagagacagcgattggacagaatttgtgaaggtatccgcccccagatcatgaacggccccctgcacccccgccccctggtggcgctgctggacggccgcgactgcactgtggagatgcccatcctgaaggacctggccactgtggccttctgtgacgcgcagtcgacgcaggaaatccacgagaaggttctaaacgaagccgtgggcgccatgatgtaccacaccatcaccctcaccagggaggacctggagaagttcaaggccctgagagtgatcgtgcggataggcagtggctatgacaacgtggacatcaaggctgccggcgagctcggaattgccgtgtgcaacatcccgtctgcagccgtggaagagacagcggactctaccatctgccacatcctcaacctgtaccggaggaacacgtggctgtaccaggcactgcgggaaggcacgcgggttcagagcgtggagcagatccgcgaggtggcctcgggagcggcccgcatccgtggggagacgctgggcctcattggctttggtcgcacggggcaggcggttgcagttcgagccaaggcctttggattcagcgtcatattttatgacccctacttgcaggatgggatcgagcggtccctgggcgtgcagagggtctacaccctgcaggatttgctgtatcagagcgactgcgtctccttgcactgcaatctcaacgaacataaccaccacctcatcaatgactttaccataaagcagatgaggcagggagcattccttgtgaacgcagcccgtggcggcctggtggacgagaaagccttagcacaagccctcaaggagggcaggatacgaggggcagccctcgacgtgcatgagtcagagcccttcagctttgctcagggtccgttgaaagatgccccgaatctcatctgcactcctcacactgcctggtacagtgagcaggcgtcactggagatgagggaggcagctgccaccgagatccgccgagccatcacaggtcgcatcccagaaagcttaagaaattgtgtgaacaaggaattctttgtcacatcagcgccttggtcagtaatagaccagcaagcaattcatcctgagctcaatggtgccacatacagatatccgccaggcatcgtgggtgtggctccaggaggacttcctgcagccatggaagggatcatccctggaggcatcccagtgactcacaacctcccgacagtggcacatccttcccaagcgccctctcccaaccagcccacaaaacacggggacaatcgagagcaccccaacgagcaatag

SEQ ID NO: 258 - DNA, 816 bp, Homo sapiens;
atggaacacggctccatcatcacccaggcgcggagggaagacgccctggtgctcaccaagcaaggcctggtctccaagtcctctcctaagaagcctcgtggacgtaacatcttcaaggcccttttctgctgttttcgcgcccagcatgttggccagtcaagttcctccactgagctcgctgcgtataaggaggaagcaaacaccattgctaagtcggatctgctccagtgtctccagtaccagttctaccagatcccagggacctgcctgctcccagaggtgacagaggaagatcaaggaaggatctgtgtggtcattgacctcgatgaaacccttgtgcatagctcctttaagccaatcaacaatgctgacttcatagtgcctatagagattgaggggaccactcaccaggtgtatgtgctcaagaggccttatgtggatgagttcctgagacgcatgggggaactctttgaatgtgttctcttcactgccagcctggccaagtatgccgaccctgtgacagacctgctggaccggtgtggggtgttccgggcccgcctattccgtgagtcttgcgtgttccaccagggctgctacgtcaaggacctcagccgcctggggagggacctgagaaagaccctcatcctggacaactcgcctgcttcttacatattccaccccgagaatgcagtgcctgtgcagtcctggtttgatgacatggcagacactgagttgctgaacctgatcccaatctttgaggagctgagcggagcagaggacgtctacaccagccttgggcagctgcgggccccttag

SEQ ID NO: 259 - DNA, 2331 bp, Homo sapiens;
atgtcgtcaacccggagccagaacccccacggcctgaagcagattggcctggaccagatctgggacgacctcagagccggcatccagcaggtgtacacacggcagagcatggccaagtccagatatatggagctctacactcatgtttataactactgtactagtgttcaccagtcaaaccaagcacgaggagctggagttcctccttctaagtcgaaaaaggggcagacacctggaggagctcagtttgttggcctggaattatataaacgacttaaggaatttttgaagaattacttgacaaatcttcttaaggatggagaagatttgatggatgagagtgtactgaaattctacactcaacaatgggaagattatcgattttcaagcaaagtgctgaatggaatttgtgcctacctcaatagacattgggttcgccgtgaatgtgacgaaggacgaaaaggaatatatgaaatctattcgcttgcattggtgacttggagagactgtctgttcaggccactgaataaacaggtaacaaatgctgttttaaagctgattgaaaaggaaaggaatggtgaaaccatcaatacaagattgattagtggagttgtacagtcttacgtggaattggggctgaatgaagatgatgcatttgcaaagggccctacgttaacagtgtataaagaatcctttgaatctcaatttttggctgacacagagagattttataccagagagagtactgaattcttgcagcagaacccagttactgaatatatgaaaaaggcagaggctcgtctgcttgaggaacaacgaagagttcaggtttaccttcatgaaagcacacaagatgaattagcaaggaaatgtgaacaagtcctcattgaaaaacacttggaaattttccacacagaatttcagaatttattggatgctgacaaaaatgaagatttgggacgcatgtataatcttgtatctagaatccaggatggcctaggagaattgaaaaaactgttggagacacacattcataatcagggtcttgcagccattgaaaagtgtggagaagctgctttaaatgaccccaaaatgtatgtacagacagtgcttgatgttcataaaaaatacaatgccctggtaatgtctgcattcaacaatgacgctggctttgtggctgctcttgataaggcttgtggtcgcttcataaacaacaacgcggttaccaagatggcccaatcatccagtaaatcccctgagttgctggctcgatactgtgactccttgttgaagaaaagttccaagaacccagaggaggcagaactagaagacacactcaatcaagtgatggttgtcttcaagtacatagaagacaaagacgtatttcagaagttctatgcgaagatgctcgccaagaggctcgtccaccagaacagtgcaagtgacgatgccgaagccagcatgatctccaagttaaagcaagcttgcgggttcgagtacacctctaaacttcagcgcatgtttcaagacattggcgtgagcaaagatctgaacgagcaattcaaaaagcacttgacaaactcagaacccctagacttggatttcagcattcaagtgctgagctccgggtcctggcccttccagcagtcttgtacatttgccttgccgtcagagttggaacgtagttatcagcgattcacagctttctacgccagccgccacagtggccgaaaattgacgtggttatatcagttgtctaaaggagaattggtaactaactgcttcaaaaacagatatactttgcaggcgtcgacattccagatggctatcctgcttcagtacaacacggaagatgcctacactgtgcagcagctgaccgacagcactcaaattaaaatggacattttggcgcaagttttacagattttattaaagtcgaagctattggtcttggaagatgaaaatgcaaatgttgatgaggtggaattgaagccagataccttaataaaattatatcttggttataaaaataagaaattaagggttaacatcaatgtgccaatgaaaaccgaacagaagcaggaacaagaaaccacacacaaaaacatcgaggaagaccgcaaactactgattcaggcggccatcgtgagaatcatgaagatgaggaaggttctgaaacaccagcagttacttggcgaggtcctcactcagctgtcctccaggttcaaacctcgagtccctgtgatcaagaaatgcattgacattctaattgagaaagaatatttggagcgagtggatggtgaaaaggacacctacagttacttggcttaa

SEQ ID NO: 260 - DNA, 2871 bp, Homo sapiens;
atgagttcaggcttatggagccaagaaaaagtcacttcaccctactgggaagagcggattttttacttgcttcttcaagaatgcagcgttacagacaaacaaacacaaaagctccttaaagtaccgaagggaagtataggacagtatattcaagatcgttctgtggggcattcaaggattccttctgcaaaaggcaagaaaaatcagattggattaaaaattctagagcaacctcatgcagttctctttgttgatgaaaaggatgttgtagagataaatgaaaagttcacagagttacttttggcaattaccaattgtgaggagaggttcagcctgtttaaaaacagaaacagactaagtaaaggcctccaaatagacgtgggctgtcctgtgaaagtacagctgagatctggggaagaaaaatttcctggagttgtacgcttcagaggacccctgttagcagagaggacagtctccggaatattctttggagttgaattgctggaagaaggtcgtggtcaaggtttcactgacggggtgtaccaagggaaacagctttttcagtgtgatgaagattgtggcgtgtttgttgcattggacaagctagaactcatagaagatgatgacactgcattggaaagtgattacgcaggtcctggggacacaatgcaggtcgaacttcctcctttggaaataaactccagagtttctttgaaggttggagaaacaatagaatctggaacagttatattctgtgatgttttgccaggaaaagaaagcttaggatattttgttggtgtggacatggataaccctattggcaactgggatggaagatttgatggagtgcagctttgtagttttgcgtgtgttgaaagtacaattctattgcacatcaatgatatcatcccagctttatcagagagtgtgacgcaggaaaggaggcctcccaaacttgcctttatgtcaagaggtgttggggacaaaggttcatccagtcataataaaccaaaggctacaggatctacctcagaccctggaaatagaaacagatctgaattattttataccttaaatgggtcttctgttgactcacaaccacaatccaaatcaaaaaatacatggtacattgatgaagttgcagaagaccctgcaaaatctcttacagagatatctacagactttgaccgttcttcaccaccactccagcctcctcctgtgaactcactgaccaccgagaacagattccactctttaccattcagtctcaccaagatgcccaataccaatggaagtattggccacagtccactttctctgtcagcccagtctgtaatggaagagctaaacactgcacccgtccaagagagtccacccttggccatgcctcctgggaactcacatggtctagaagtgggctcattggctgaagttaaggagaaccctcctttctatggggtaatccgttggatcggtcagccaccaggactgaatgaagtgctcgctggactggaactggaagatgagtgtgcaggctgtacggatggaaccttcagaggcactcggtatttcacctgtgccctgaagaaggcgctgtttgtgaaactgaagagctgcaggcctgactctaggtttgcatcattgcagccggtttccaatcagattgagcgctgtaactctttagcatttggaggctacttaagtgaagtagtagaagaaaatactccaccaaaaatggaaaaagaaggcttggagataatgattgggaagaagaaaggcatccagggtcattacaattcttgttacttagactcaaccttattctgcttatttgcttttagttctgttctggacactgtgttacttagacccaaagaaaagaacgatgtagaatattatagtgaaacccaagagctactgaggacagaaattgttaatcctctgagaatatatggatatgtgtgtgccacaaaaattatgaaactgaggaaaatacttgaaaaggtggaggctgcatcaggatttacctctgaagaaaaagatcctgaggaattcttgaatattctgtttcatcatattttaagggtagaacctttgctaaaaataagatcagcaggtcaaaaggtacaagattgttacttctatcaaatttttatggaaaaaaatgagaaagttggcgttcccacaattcagcagttgttagaatggtcttttatcaacagtaacctgaaatttgcagaggcaccatcatgtctgattattcagatgcctcgatttggaaaagactttaaactatttaaaaaaatttttccttctctggaattaaatataacagatttacttgaagacactcccagacagtgccggatatgtggagggcttgcaatgtatgagtgtagagaatgctacgacgatccggacatctcagctggaaaaatcaagcagttttgtaaaacctgcaacactcaagtccaccttcatccgaagaggctgaatcataaatataacccagtgtcacttcccaaagacttacccgactgggactggagacacggctgcatcccttgccagaatatggagttatttgctgttctctgcatagaaacaagccactatgttgcttttgtgaagtatgggaaggacgattctgcctggctcttctttgacagcatggccgatcgggatggtggtcagaatggcttcaacattcctcaagtcaccccatgcccagaagtaggagagtacttgaagatgtctctggaagacctgcattccttggactccaggagaatccaaggctgtgcacgaagactgctttgtgatgcatatatgtgcatgtaccagagtccaacaatgagtttgtacaaataa

SEQ ID NO: 261 - DNA, 1185 bp, Homo sapiens;
atggacctgtgccacccagagcccgcggagctgagcagcggggagacggaagagttacagaggatcaagtggcaccgaaagcagctcctggaggacatccagaagctgaaggatgagattgcagatgtgtttgcccaaatcgactgcttcgagagtgcggaggagagccggatggcccagaaggagaaggagctgtgtattgggcgcaagaagttcaacatggaccccgccaagggtatccagtatttcattgagcacaagctgctgacccctgacgtccaggacattgcacggttcctgtataaaggcgagggcctcaacaagacagccattggtacctacctgggggagagggatcccatcaacctgcaggtcctccaggccttcgtggactgccacgagttcgccaacctcaacctcgtccaggccctcaggcagttcctgtggagcttccggctgccgggcgaggcccagaagatagaccggatgatggaggcctttgccactcgatactgcctctgcaacccaggcgtcttccagtccacagacacctgctacgtgttgtccttctccatcatcatgctcaacaccagcctccacaatcccaacgtccgggacaggccgccttttgagcgctttgtgtccatgaaccgcggcatcaacaatggtagcgacctgcccgaggaccagctgcggaacctcttcgacagcatcaagagtgagccattctccatccctgaggacgacggcaatgacctcactcacaccttcttcaatccagaccgggagggttggctgctcaagctagggggccgcgtgaagacgtggaaacggcgctggttcatcctgaccgacaactgcctctactacttcgagttcaccactgacaaggagccacggggaattatacctcttgagaacctctcggtgcagaaggtggatgaccccaagaagccattctgcctggagctctacaaccctagctgccgaggccagaaaatcaaggcctgcaagaccgatggcgacggcagggtggtggagggcaagcacgaatcgtaccgcatctcagccaccagtgccgaggaacgtgaccagtggatcgagtccatccgagccagcatcacccgtgtccccttctacgacctggtctctactcggaagaagaagattgccagcaagcagtga

SEQ ID NO: 262 - DNA, 1263 bp, Homo sapiens;
atggagaccaaacgggtggagattcccggcagcgtcctggacgatctctgcagccgatttattttgcatattcccagcgaggaaagagacaatgcaatccgagtgtgttttcagattgaacttgcccattggttttacttggatttctacatgcagaacacaccaggattacctcagtgtgggataagagactttgctaaagctgtcttcagtcattgtccgtttttgctgcctcaaggtgaagatgtggaaaaagttttggatgaatggaaggaatataaaatgggagtaccaacatatggtgcaattattcttgatgagacacttgaaaatgtactactagttcaggggtacctagcaaaatcaggctggggatttccaaaaggaaaagtaaataaagaagaagctcctcatgattgtgctgctagagaggtctttgaagaaactggttttgatatcaaagactatatttgtaaggatgattacattgaacttcgaatcaatgaccagcttgctcgtttgtacatcattccaggaattccaaaagacacaaaatttaacccaaaaactagaagagaaattcggaacattgagtggttctctattgagaaattgccttgtcatagaaatgatatgacccccaaatccaaacttggtttggcacctaacaaattttttatggccattccctttatcagaccattaagggactggctttctcgaagatttggcgattcctcagacagtgacaatggattttcctcaactggtagcacgccggctaaacccactgtggaaaaattgagtcgaaccaaattccgccacagtcagcagttatttcctgacggttctcctggtgaccagtgggtaaagcacaggcaaccactgcagcaaaagccatataataatcattctgaaatgtctgaccttttaaaaggaaagaatcaaagtatgaggggaaatggcagaaaacagtatcaagattcacctaatcaaaagaaaagaacaaatgggcttcagccagcaaagcagcagaattctttgatgaagtgtgaaaagaaacttcatccacggaaacttcaggataattttgaaacagatgctgtatatgacttgcctagctccagtgaagaccagttgctagaacatgctgagggacagcccgtggcatgtaatggacattgcaagttccccttttcatccagagcctttttgagtttcaagtttgaccataatgctataatgaaaatcttggacctttga

SEQ ID NO: 263 - DNA, 5139 bp, Homo sapiens;
atggaaagaaatgttcttacaacattttcacaggaaatgtcccagttaattttgaatgaaatgccaaaagctgaatattccagtttattcaatgattttgttgaatctgaattttttttgattgatggggattcattacttatcacatgtatctgtgagatatcatttaagcctgggcagaacctccatttcttctatctggttgaacgctatcttgtggatcttattagcaaaggaggacaattcaccatagttttcttcaaggatgccgagtatgcgtatttcaacttccctgaacttctttctttgagaactgctttaattcttcatcttcagaagaataccaccattgatgttcgaacaacattttcgagatgcttatcaaaagagtggggaagtttcttggaagagagttacccatatttcctgatagttgcagacgaaggcctgaacgatctacaaacacagcttttcaactttttaatcattcattcttgggcaaggaaggtcaacgttgtactttcctcagggcaagaatctgatgttctttgcctttatgcataccttcttccaagcatgtacagacaccagattttttcctggaagaataagcagaacattaaagatgcttatacaaccctgcttaaccagttggaaagatttaagctttcagcattagcacctctttttggaagtttaaaatggaataatattacggaagaggcacacaagactgtatctctgcttacacaagtctggccagaaggatctgacattcggcgtgtcttttgtgttacttcatgctcattatctttgagaatgtaccatcgctttttaggaaacagagagccctcctctggtcaggaaactgagatccaacaggtgaacagtaattgcttaaccctgcaggagatggaagatttgtgtaaactgcattgtctcactgtggtttttctactccatctgcctctttctcaaagagcttgtgctagagtcatcacttcccattgggctgaggacatgaagcctttattacaaatgaaaaagtggtgtgaatatttcatcttaagaaatatacatacttttgaattttggaatctgaatttaattcacctttctgacttaaatgatgagcttttgttgaagaatattgctttttactatgaaaatgaaaatgtaaaaggcctacatttgaatttgggagataccattatgaaagattatgaatatctctggaataccgtatcaaagttggtcagagactttgaggttggacagccatttcctctgagaacaacaaaagtttgttttcttgaaaagaaaccatcaccaatcaaagacagctccaatgaaatggtgcccaatttgggttttattccaacgtcatcttttgtggttgataaatttgctggagatattttgaaagatttgccttttctaaagagtgatgatcctattgttacttcactggttaaacaaaaggaatttgatgaacttgtgcactggcattctcataaacccctgagtgatgattatgacaggtccaggtgtcagtttgatgaaaaatctagagaccctcgtgttcttagatctgtgcaaaagtatcatgttttccaacggttttatgggaattcattagaaacagtctcttcgaaaatcatcgtgactcaaactattaagtcaaagaaggattttagtgggcccaagagcaaaaaggcacacgagaccaaggctgaaataattgctagagagaataagaaaaggttatttgccagggaagaacaaaaggaagagcaaaagtggaatgctttgtcattttctattgaagagcaattgaaagaaaatttacactctggaataaagagcctggaagattttttgaaatcctgtaaaagtagctgtgtgaaacttcaggttgaaatggtggggttaactgcttgcttgaaagcctggaaagaacattgccgaagtgaagaaggtaaaaccacgaaagatttaagtatagctgttcaggtgatgaaaaggatccactccttgatggaaaaatactcagaacttttacaagaagatgatcggcaactcatagccagatgccttaagtatttaggatttgatgagttggcaagttctttacatccagcccaggatgcagaaaatgatgtaaaagtgaagaaaaggaataaatattcagttggcattgggccagctcggttccaactgcaatacatgggccattatttgatacgagatgagagaaaagacccagatcccagggtccaggattttattcccgacacatggcagcgagagctccttgatgttgtggataagaatgagtcagcagtgattgttgccccaacgtcctcaggcaaaacctatgcctcctactactgtatggagaaagtgctgaaggagagcgacgacggggtggtcgtgtacgttgcacccacaaaggcccttgttaatcaagtggcagcaactgttcagaatcgttttacgaaaaatctgccaagtggtgaagttctctgtggtgttttcaccagggagtatcgtcatgatgccttaaactgtcaggtacttattacagtgcctgcctgctttgaaattctgctgcttgctcctcatcgccaaaactgggtgaaaaagatcagatatgttatatttgatgaggttcattgtcttggtggagaaattggagcagaaatctgggaacatctccttgtcatgatccgatgtccctttttggctctttcagctaccataagtaatcctgaacatctcaccgagtggctacaatcggtaaaatggtactggaaacaagaagacaaaataattgaaaataataccgcttctaaaagacatgtgggtcgtcaggccggctttcccaaagactacttgcaagtaaaacaatcgtataaagttagacttgtgctctatggagagaggtataatgatctagagaagcatgtatgttcaataaaacatggtgacattcattttgatcattttcacccatgtgctgcactaacaacagatcatattgaaaggtatggattccctcctgatcttaccctttcacctcgagaaagcatccagctgtatgatgccatgtttcaaatttggaaaagttggcctcgggcccaggaactgtgcccagaaaacttcattcattttaacaataaattagtcattaaaaagatggatgctaggaaatatgaagagagtctaaaggcagaattaacaagttggattaaaaatggcaacgtagagcaggccagaatggtacttcagaatcttagtcctgaagcagatttgagtccagaaaacatgatcaccatgtttccacttctagttgaaaaactaaggaaaatggagaagttacctgcactattttttttattcaagttaggagctgtagaaaacgcagctgaaagtgtgagcactttcctaaagaaaaagcaggagacaaaaaggcctcccaaagctgataaagaagcccatgtcatggctaacaaacttcgaaaagttaaaaaatccatagagaaacaaaagatcatagatgaaaagagccagaaaaaaaccagaaatgtggatcaaagcctaatacatgaagctgaacatgataatctagtgaagtgtctagagaagaacctggaaatcccacaggactgcacatatgctgatcaaaaagcagtggacactgagactttgcagaaggtatttggtcgagtaaaatttgaaagaaaaggtgaagaattgaaagccttggcagaaaggggtattggatatcatcacagtgctatgagtttcaaagaaaaacaattagttgaaatcctctttagaaaaggatatcttagggtggtgacagctactggaacacttgctttaggtgtcaacatgccttgtaaatctgtggtttttgctcaaaactcagtctatctggatgcgttgaattatagacagatgtctggccgtgctggaagaagaggtcaagacctgatgggagatgtatatttctttgatattccattccccaaaataggaaaactcataaaatccaatgttcctgagctgagaggacacttccctctcagcataaccctggtcctgcgactcatgctgctggcttccaagggagatgacccagaggatgccaaggcaaaggtgctatcagtgctaaagcattcattgctgtccttcaagcaacccagagtcatggacatgttaaaactttacttcctgttttctttgcagttcctggtgaaagagggctatttagatcaagaaggtaatcctatggggtttgctggacttgtatcacatttgcattatcatgaaccttctaatcttgtttttgtcagttttcttgtaaatggactcttccatgatctctgtcagccaaccaggaaaggctcaaaacatttttctcaagacgttatggaaaagctagtattagtattggcacatctctttggaagaagatattttccaccaaagttccaagatgcacacttcgagttttatcaatcaaaggtgttccttgatgatctccctgaggattttagtgatgctttagatgaatataacatgaaaattatggaggactttaccactttcctacgaattgtttccaaactggctgatatgaatcaggaatatcaactcccattgtcaaaaatcaaattcacaggtaaagaatgtgaagactctcaactcgtatctcatttgatgagctgcaaggaaggaagagtagcaatttcaccatttgtttgtctgtctgggaactttgatgatgatttgcttcgactagaaactccaaaccatgttactctaggcacaatcggtgtcaatcgctctcaggctccagtgctgttgtcacagaaatttgataaccgaggaaggaaaatgtcgcttaatgcctatgcactggatttctacaaacatggttccttgataggattagtccaggataacaggatgaatgaaggagatgcttattatttgttgaaggattttgcactcaccattaaatctatcagtgtttccttgcgtgagctatgtgaaaatgaagacgacaacgttgtcttagcctttgaacaactgagtacaactttttgggaaaagttaaacaaagtctaa

SEQ ID NO: 264 - DNA, 1653 bp, Homo sapiens;
atggtgcccaaggcagacagcggcgccttcctgctgctcttcctgctcgtgctcactgtcaccgagccgctgcggccagagctgcggtgcaaccctgggcagtttgcgtgtcgcagcggcaccatccagtgcatccccctcccctggcagtgtgacggctgggcgacttgcgaggatgagagcgacgaagccaactgtccagaagtgaccggggaggtgcgtcctcatcatgggaaggaggctgtggatccgcggcaggggcgggccagaggaggcgacccttcgcacttccacgcggtgaacgtggcgcagcccgttcgcttcagcagtttcctagggaagtgcccgacagggtggcaccactacgaaggcacggccagctgctaccgggtctacctgagcggggagaactactgggatgccgcgcagacctgccagcgcctgaatggctctctcgccaccttctccactgaccaggagctgcgctttgtcctggcccaggaatgggaccagcccgagcggagctttggttggaaggaccagcgcaagttgtgggttggctatcagtatgttatcactggccggaaccgctccttggaaggtcgctgggaggtggcattcaaaggctcttcagaggtgttcctgcccccagaccccatctttgcctcggccatgtctgagaacgacaacgtgttctgtgcccagcttcagtgcttccatttccccaccctgcggcaccacgacctccacagctggcacgccgagagctgctacgagaagtcttcatttctgtgtaaaagaagtcaaacatgtgttgacatcaaggacaacgtggtggatgaagggttctacttcacccctaagggggacgacccatgcctgagctgcacctgccatggaggggagcctgagatgtgtgtggctgctctctgtgagaggccccagggctgccaacagtaccgcaaggaccccaaagagtgctgcaagttcatgtgtctggacccagatggcaacagtctgtttgactccatggccagcgggatgcgcctggtcgtcagctgcatctcctccttcctcatcctgtcactgctgctcttcatggtccaccggctgcgccagcggcgccgggagcgcatcgagtccctgattggagcaaacttgcaccacttcaacctcggccgcaggatccctggctttgattacggcccagacgggtttggcacgggcctcacgccgctgcatctttctgacgacggagagggtgggactttccatttccacgaccctccacctccctacacggcatacaagtacccggacatcggccagcccgacgaccctccgccgccctacgaggcctccatccacccggacagtgtgttctatgaccctgcagacgatgatgcttttgagcctgtggaggtcagcctgccagcccctggggatggtgggagtgaaggtgcattactccggcgcctggagcagcctctgcccactgcgggggcctctctggcagacctggaagactctgccgacagcagcagcgccctgctcgtgccccctgaccctgcccagagcgggagcaccccagctgcagaggcactgccagggggtggccgccacagccgcagctccctcaatactgtggtgtag

SEQ ID NO: 265 - DNA, 2208 bp, Homo sapiens;
atggccaaggagaggggcctaataagccccagtgattttgcccagctgcaaaaatacatggaatactccaccaaaaaggtcagtgatgtcctaaagctcttcgaggatggcgagatggctaaatatgtccaaggagatgccattgggtacgagggattccagcaattcctgaaaatctatctcgaagtggataatgttcccagacacctaagcctggcactgtttcaatcctttgagactggtcactgcttaaatgagacaaatgtgacaaaagatgtggtgtgtctcaatgatgtttcctgctacttttcccttctggagggtggtcggccagaagacaagttagaattcaccttcaagctgtacgacacggacagaaatgggatcctggacagctcagaagtggacaaaattatcctacagatgatgcgagtggctgaatacctggattgggatgtgtctgagctgaggccgattcttcaggagatgatgaaagagattgactatgatggcagtggctctgtctctcaagctgagtgggtccgggctggggccaccaccgtgccactgctagtgctgctgggtctggagatgactctgaaggacgacggacagcacatgtggaggcccaagaggttccccagaccagtctactgcaatctgtgcgagtcaagcattggtcttggcaaacagggactgagctgtaacctctgtaagtacactgttcacgaccagtgtgccatgaaagccctgccttgtgaagtcagcacctatgccaagtctcggaaggacattggtgtccaatcacatgtgtgggtgcgaggaggctgtgagtccgggcgctgcgaccgctgtcagaaaaagatccggatctaccacagtctgaccgggctgcattgtgtatggtgccacctagagatccacgatgactgcctgcaagcggtgggccatgagtgtgactgtgggctgctccgggatcacatcctgcctccatcttccatctatcccagtgtcctggcctctggaccggatcgtaaaaatagcaaaacaagccagaagaccatggatgatttaaatttgagcacctctgaggctctgcggattgaccctgttcctaacacccacccacttctcgtctttgtcaatcctaagagtggcgggaagcaggggcaaagggtgctctggaagttccagtatatattaaaccctcgacaggtgttcaacctcctaaaggatggtcctgagatagggctccgattattcaaggatgttcctgatagccggattttggtgtgtggtggagacggcacagtaggctggattctagagaccattgacaaagctaacttgccagttttgcctcctgttgctgtgttgcccctgggtactggaaatgatctggctcgatgcctaagatggggaggaggttatgaaggacagaatctggcaaagatcctcaaggatttagagatgagtaaagtggtacatatggatcgatggtctgtggaggtgatacctcaacaaactgaagaaaaaagtgacccagtcccctttcaaatcatcaataactacttctctattggcgtggatgcctctattgctcatcgattccacatcatgcgagagaaatatccggagaagttcaacagcagaatgaagaacaagctatggtacttcgaatttgccacatctgaatccatcttctcaacatgcaaaaagctggaggagtctttgacagttgagatctgtgggaaaccgctggatctgagcaacctgtccctagaaggcatcgcagtgctaaacatccctagcatgcatggtggctccaacctctggggtgataccaggagaccccatggggatatctatgggatcaaccaggccttaggtgctacagctaaagtcatcaccgaccctgatatcctgaaaacctgtgtaccagacctaagtgacaagagactggaagtggttgggctggagggtgcaattgagatgggccaaatctataccaagctcaagaatgctggacgtcggctggccaagtgctctgagatcaccttccacaccacaaaaacccttcccatgcaaattgacggagaaccctggatgcagacgccctgtacaatcaagatcacccacaagaaccagatgcccatgctcatgggcccacccccccgctccaccaatttctttggcttcttgagctaa

SEQ ID NO: 266 - DNA, 2037 bp, Homo sapiens;
atggagcttcggtcctaccaatgggaggtgatcatgcctgccctggagggcaagaatatcatcatctggctgcccacgggtgccgggaagacccgggcggctgcttatgtggccaagcggcacctagagactgtggatggagccaaggtggttgtattggtcaacagggtgcacctggtgacccagcatggtgaagagttcaggcgcatgctggatggacgctggaccgtgacaaccctgagtggggacatgggaccacgtgctggctttggccacctggcccggtgccatgacctgctcatctgcacagcagagcttctgcagatggcactgaccagccccgaggaggaggagcacgtggagctcactgtcttctccctgatcgtggtggatgagtgccaccacacgcacaaggacaccgtctacaacgtcatcatgagccagtacctagaacttaaactccagagggcacagccgctaccccaggtgctgggtctcacagcctccccaggcactggcggggcctccaaactcgatggggccatcaaccacgtcctgcagctctgtgccaacttggacacgtggtgcatcatgtcaccccagaactgctgcccccagctgcaggagcacagccaacagccttgcaaacagtacaacctctgccacaggcgcagccaggatccgtttggggacttgctgaagaagctcatggaccaaatccatgaccacctggagatgcctgagttgagccggaaatttgggacgcaaatgtatgagcagcaggtggtgaagctgagtgaggctgcggctttggctgggcttcaggagcaacgggtgtatgcgcttcacctgaggcgctacaatgacgcgctgctcatccatgacaccgtccgcgccgtggatgccttggctgcgctgcaggatttctatcacagggagcacgtcactaaaacccagatcctgtgtgccgagcgccggctgctggccctgttcgatgaccgcaagaatgagctggcccacttggcaactcatggcccagagaatccaaaactggagatgctggaaaagatcctgcaaaggcagttcagtagctctaacagccctcggggtatcatcttcacccgcacccgccaaagcgcacactccctcctgctctggctccagcagcagcagggcctgcagactgtggacatccgggcccagctactgattggggctgggaacagcagccagagcacccacatgacccagagggaccagcaagaagtgatccagaagttccaagatggaaccctgaaccttctggtggccacgagtgtggcggaggaggggctggacatcccacattgcaatgtggtggtgcgttatgggctcttgaccaatgaaatctccatggtccaggccaggggccgtgcccgggccgatcagagtgtatacgcgtttgtagcaactgaaggtagccgggagctgaagcgggagctgatcaacgaggcgctggagacgctgatggagcaggcagtggctgctgtgcagaaaatggaccaggccgagtaccaggccaagatccgggatctgcagcaggcagccttgaccaagcgggcggcccaggcagcccagcgggagaaccagcggcagcagttcccagtggagcacgtgcagctactctgcatcaactgcatggtggctgtgggccatggcagcgacctgcggaaggtggagggcacccaccatgtcaatgtgaaccccaacttctcgaactactataatgtctccagggatcctgtggtcatcaacaaagtcttcaaggactggaagcctgggggtgtcatcagctgcaggaactgtggggaggtctggggtctgcagatgatctacaagtcagtgaagctgccagtgctcaaagtccgcagcatgctgctggagacccctcaggggcggatccaggccaaaaagtggtcccgcgtgcccttctccgtgcctgactttgacttcctgcagcattgtgccgagaacttgtcggacctctccctggactga

SEQ ID NO: 267 - DNA, 1689 bp, Homo sapiens;
atggacgacaaaggcgacccgagcaatgaggaggcacctaaggccatcaaacccaccagcaaagagttcaggaaaacatggggttttcgaaggaccactatcgccaagcgagagggcgcaggggacgcggaggctgacccactggagccgccacccccacagcagcagctgggcctgtccctgcggcgcagtgggaggcagcccaagcgcactgagcgcgtggagcagttcctgaccattgcgcggcgccgcggcaggaggagcatgcctgtctccctggaggattctggtgagcccacgtcctgccccgccacagacgccgagacagcctccgagggcagcgtggaaagcgcttctgagaccagaagcggcccccagtctgcttccacagctgtgaaggaacgaccagcctcttctgaaaaggtgaaaggaggggatgaccacgatgacacctccgatagtgacagcgatggcctgaccttgaaagagcttcagaatcgccttcgcaggaagcgggaacaggagcccactgagaggcccctgaaagggatccagagtcgcctgcggaagaagcgccgggaggagggtcccgccgagactgtgggctccgaggccagtgacactgtggagggcgtcctgcccagtaagcaggagcccgagaacgatcagggggttgtgtcccaggctgggaaagatgacagagagagtaagttggagggaaaggcggctcaggacatcaaagatgaggagcctggagacttgggccgaccgaagcctgaatgtgagggttacgaccccaacgccctgtattgcatttgccgccagcctcacaacaacaggtttatgatttgctgtgaccgctgtgaagaatggtttcatggcgattgtgtgggcatttctgaggctcgagggaggcttttggaaaggaatggggaagactatatctgcccaaactgcaccattctgcaagtgcaggatgagactcattcagaaacggcagatcagcaggaagctaaatggagacctggagatgctgatggcaccgattgtacaagtataggaacaatagagcagaagtctagcgaagaccaagggataaagggtagaattgagaaagctgcaaatccaagtggcaagaagaaactcaagatcttccagcctgtgatagaggcgcctggtgcctcaaaatgtattggccccgggtgctgtcacgtggcgcagcccgactcggtgtactgcagtaatgactgtatcctcaaacacgccgcagcgacaatgaagtttctaagctcaggtaaagaacagaagccaaagcctaaagaaaagatgaagatgaagccagagaagcccagtcttccgaaatgcggtgctcaggcaggtattaaaatctcttctgtgcacaagagaccagctccagaaaaaaaagagaccacagtgaagaaggcagtggtggtccctgcgcggagtgaagcactcgggaaggaagcagcttgtgagagcagcacgccgtcgtgggcgagcgatcacaattacaatgcagtaaagccagaaaagactgctgctccctcgccgtcactgttgtataaatgtatgtatcacctaggggttggcctcctggacccctcccgttctttctggatagccatcccctgggcctgtccaggactgggagttgcagctttgtgttaa

SEQ ID NO: 268 - DNA, 6207 bp, Homo sapiens;
atgcaggctgataaatgcaggacaagtagtagaagtgtcaaaaaggaactggtgattgagtcccccctgcaatacaaggatgcagctcagggcgaagtggaagcagagagcccgggccctgtgccggcaaagccaaagctaattgagccactcgactatgaaaatgtcatcgtccagaagaagactcagatcctgaacgactgtttacgggagatgctgctcttcccttacgatgactttcagacggccatcctgagacgacagggtcgatacatatgctcaacagtgcctgcgaaggcggaagaggaagcacagagcttgtttgttacagagtgcatcaaaacctataactctgactggcatcttgtgaactataaatatgaagattactcaggagagtttcgacagcttccgaacaaagtggtcaagttggataaacttccagttcatgtctatgaagttgacgaggaggtcgacaaagatgaggatgctgcctcccttggttcccagaagggtgggatcaccaagcatggctggctgtacaaaggcaacatgaacagtgccatcagcgtgaccatgaggtcatttaagagacgatttttccacctgattcaacttggcgatggatcctataatttgaatttttataaagatgaaaagatctccaaagaaccaaaaggatcaatatttctggattcctgtatgggtgtcgttcagaacaacaaagtcaggcgttttgcttttgagctcaagatgcaggacaaaagtagttatctcttggcagcagacagtgaagtggaaatggaagaatggatcacaattctaaataagatcctccagctcaactttgaagctgcaatgcaagaaaagcgaaatggcgactctcacgaagatgatgaacaaagcaaattggaaggttctggttccggtttagatagctacctgccggaacttgccaagagtgcaagagaagcagaaatcaaactgaaaagtgaaagcagagtcaaacttttttatttggacccagatgcccagaagcttgacttctcatcagctgagccagaagtgaagtcatttgaagagaagtttggaaaaaggatccttgtcaagtgcaatgatttatctttcaatttgcaatgctgtgttgccgaaaatgaagaaggacccactacaaatgttgaacctttctttgttactctatccctgtttgacataaaatacaaccggaagatttctgccgatttccacgtagacctgaaccatttctcagtgaggcaaatgctcgccaccacgtccccggcgctgatgaatggcagtgggcagagcccatctgtcctcaagggcatccttcatgaagccgccatgcagtatccgaagcagggaatattttcagtcacttgtcctcatccagatatatttcttgtggccagaattgaaaaagtccttcaggggagcatcacacattgcgctgagccatatatgaaaagttcagactcttctaaggtggcccagaaggtgctgaagaatgccaagcaggcatgccaaagactaggacagtatagaatgccatttgcttgggcagcaaggacattgtttaaggatgcatctggaaatcttgacaaaaatgccagattttctgccatctacaggcaagacagcaataagctatccaatgatgacatgctcaagttacttgcagactttcggaaacctgagaagatggctaagctcccagtgattttaggcaatctagacattacaattgataatgtttcctcagacttccctaattatgttaattcatcatacattcccacaaaacaatttgaaacctgcagtaaaactcccatcacgtttgaagtggaggaatttgtgccctgcataccaaaacacactcagccttacaccatctacaccaatcacctttacgtttatcctaagtacttgaaatacgacagtcagaagtcttttgccaaggctagaaatattgcgatttgcattgaattcaaagattcagatgaggaagactctcagccccttaagtgcatttatggcagacctggtgggccagttttcacaagaagcgcctttgctgcagttttacaccatcaccaaaacccagaattttatgatgagattaaaatagagttgcccactcagctgcatgaaaagcaccacctgttgctcacattcttccatgtcagctgtgacaactcaagtaaaggaagcacgaagaagagggatgtcgttgaaacccaagttggctactcctggcttcccctcctgaaagacggaagggtggtgacaagcgagcagcacatcccggtctcggcgaaccttccttcgggctatcttggctaccaggagcttgggatgggcaggcattatggtccggaaattaaatgggtagatggaggcaagccactgctgaaaatttccactcatctggtttctacagtgtatactcaggatcagcatttacataattttttccagtactgtcagaaaaccgaatctggagcccaagccttaggaaacgaacttgtaaagtaccttaagagtctgcatgcgatggaaggccacgtgatgatcgccttcttgcccactatcctaaaccagctgttccgagtcctcaccagagccacacaggaagaagtcgcggttaacgtgactcgggtcattattcatgtggttgcccagtgccatgaggaaggattggagagccacttgaggtcatatgttaagtacgcgtataaggctgagccatatgttgcctctgaatacaagacagtgcatgaagaactgaccaaatccatgaccacgattctcaagccttctgccgatttcctcaccagcaacaaactactgaagtactcatggtttttctttgatgtactgatcaaatctatggctcagcatttgatagagaactccaaagttaagttgctgcgaaaccagagatttcctgcatcctatcatcatgcagtggaaaccgttgtaaatatgctgatgccacacatcactcagaagtttcgagataatccagaggcatctaagaacgcgaatcatagccttgctgtcttcatcaagagatgtttcaccttcatggacaggggctttgtcttcaagcagatcaacaactacattagctgttttgctcctggagacccaaagaccctctttgaatacaagtttgaatttctccgtgtagtgtgcaaccatgaacattatattccgttgaacttaccaatgccatttggaaaaggcaggattcaaagataccaagacctccagcttgactactcattaacagatgagttctgcagaaaccacttcttggtgggactgttactgagggaggtggggacagccctccaggagttccgggaggtccgtctgatcgccatcagtgtgctcaagaacctgctgataaagcattcttttgatgacagatatgcttcaaggagccatcaggcaaggatagccaccctctacctgcctctgtttggtctgctgattgaaaacgtccagcggatcaatgtgagggatgtgtcacccttccctgtgaacgcgggcatgactgtgaaggatgaatccctggctctaccagctgtgaatccgctggtgacgccgcagaagggaagcaccctggacaacagcctgcacaaggacctgctgggcgccatctccggcattgcttctccatatacaacctcaactccaaacatcaacagtgtgagaaatgctgattcgagaggatctctcataagcacagattcgggtaacagccttccagaaaggaatagtgagaagagcaattccctggataagcaccaacaaagtagcacattgggaaattccgtggttcgctgtgataaacttgaccagtctgagattaagagcctactgatgtgtttcctctacatcttaaagagcatgtctgatgatgctttgtttacatattggaacaaggcttcaacatctgaacttatggatttttttacaatatctgaagtctgcctgcaccagttccagtacatggggaagcgatacatagccagaacaggaatgatgcatgccagattgcagcagctgggcagcctggataactctctcacttttaaccacagctatggccactcggacgcagatgttctgcaccagtcattacttgaagccaacattgctactgaggtttgcctgacagctctggacacgctttctctatttacattggcgtttaagaaccagctcctggccgaccatggacataatcctctcatgaaaaaagtttttgatgtctacctgtgttttcttcaaaaacatcagtctgaaacggctttaaaaaatgtcttcactgccttaaggtccttaatttataagtttccctcaacattctatgaagggagagcggacatgtgtgcggctctgtgttacgagattctcaagtgctgtaactccaagctgagctccatcaggacggaggcctcccagctgctctacttcctgatgaggaacaactttgattacactggaaagaagtcctttgtccggacacatttgcaagtcatcatatctgtcagccagctgatagcagacgttgttggcattgggggaaccagattccagcagtccctgtccatcatcaacaactgtgccaacagtgaccggcttattaagcacaccagcttctcctctgatgtgaaggacttaaccaaaaggatacgcacggtgctaatggccaccgcccagatgaaggagcatgagaacgacccagagatgctggtggacctccagtacagcctggccaaatcctatgccagcacgcccgagctcaggaagacgtggctcgacagcatggccaggatccatgtcaaaaatggcgatctctcagaggcagcaatgtgctatgtccacgtaacagccctagtggcagaatatctcacacggaaagaagcagtccagtgggagccgccccttctcccccacagccatagcgcctgcctgaggaggagccggggaggcgtgtttagacaaggatgcaccgccttcagggtcattaccccaaacatcgacgaggaggcctccatgatggaagacgtggggatgcaggatgtccatttcaacgaggatgtgctgatggagctccttgagcagtgcgcagatggactctggaaagccgagcgctacgagctcatcgccgacatctacaaacttatcatccccatttatgagaagcggagggattttgagaggctggcccatctgtatgacacgctgcaccgggcctacagcaaagtgaccgaggtcatgcactcgggccgcaggcttctggggacctacttccgggtagccttcttcgggcaggcagcgcaataccagtttacagacagtgaaacagatgtggagggattctttgaagatgaagatggaaaggagtatatttacaaggaacccaaactcacaccgctgtcggaaatttctcagagactccttaaactgtactcggataaatttggttctgaaaatgtcaaaatgatacaggattctggcaaggtcaaccctaaggatctggattctaagtatgcatacatccaggtgactcacgtcatccccttctttgacgaaaaagagttgcaagaaaggaaaacagagtttgagagatcccacaacatccgccgcttcatgtttgagatgccatttacgcagaccgggaagaggcagggcggggtggaagagcagtgcaaacggcgcaccatcctgacagccatacactgcttcccttatgtgaagaagcgcatccctgtcatgtaccagcaccacactgacctgaaccccatcgaggtggccattgacgagatgagtaagaaggtggcggagctccggcagctgtgctcctcggccgaggtggacatgatcaaactgcagctcaaactccagggcagcgtgagtgttcaggtcaatgctggcccactagcatatgcgcgagctttcttagatgatacaaacacaaagcgatatcctgacaataaagtgaagctgcttaaggaagttttcaggcaatttgtggaagcttgcggtcaagccttagcggtaaacgaacgtctgattaaagaagaccagctcgagtatcaggaagaaatgaaagccaactacagggaaatggcgaaggagctttctgaaatcatgcatgagcagctgggatga

SEQ ID NO: 269 - DNA, 1491 bp, Homo sapiens;
atgactcggggagccagactgcgatcagacgcgcgtgcccagctgaaccagctgtctctagacggagggacgggaagtggccagaaggggaagtgtgaggagttcccgtccagcctgtcatcagtctccccaggtcttgaagcggcggccctgctcctggccgtgaccatggaccctctggagacccctatcaaggatggcatcctctaccagcagcatgtcaagtttggcaagaagtgctggcggaaggtgtgggctctgctgtatgcaggaggcccatcaggcgtggcacggctggagagctgggaggtccgggatggtggcctgggagcagcgggtgacaggtcggcagggcctggccggcgaggggagcgacgggtcatccgcctggctgactgtgtgtccgtgctgccggctgacggcgagagctgcccccgggacaccggtgccttcctgctcaccaccaccgagcgaagccatctactggctgctcagcaccgccaggcctggatgggccccatctgccagctggccttcccggggacaggggaggcctcctcaggatccacagatgcccagtctcccaagaggggcctggtccccatggaggaaaactccatctactcctcctggcaggaagtgggcgagtttcccgtggtggtgcagaggactgaggccgccacccgctgccagctgaaggggccggccctgctggtgctgggcccagacgccatccagctgagggaggccaagggcacccaggccctctacagctggccctaccacttcctgcgcaagttcggctccgacaagggcgtgttctcctttgaggccggccgtcgctgccactcgggtgagggcctctttgccttcagcaccccctgtgcccctgacctgtgcagggctgtggccggggccatcgcccgccagcgggagcggctgccagagctgaccaggccccagccctgccccctgccacgggccacctctctgccctccctggacacccccggagagcttcgggagatgccaccaggacctgagccacccacgtccaggaaaatgcacctggccgagcccggaccccagagcctgccgctactgctaggcccggagcccaacgatctggcgtccgggctctacgcttcagtgtgcaagcgtgccagtgggcccccaggcaatgagcacctctatgagaacctgtgtgtgctggaggccagccccacgctgcacggtggggaacctgagccgcacgagggccccggcagccgcagccccacaaccagtcccatctaccacaacggccaggacttgagctggcccggcccggccaacgacagtaccctggaggcccagtaccggcggctgctggagctggatcaggtggagggcacaggccgccctgaccctcaggcaggtttcaaggccaagctggtgaccctgctgagtcgtgagcggaggaagggcccagccccttgtgaccggccctga

SEQ ID NO: 270 - DNA, 1461 bp, Homo sapiens;
atgcagccctccggcctcgagggtcccggcacgtttggtcggtggcctctgctgagtctgctgctcctgctgctgctgctccagcctgtaacctgtgcctacaccacgccaggcccccccagagccctcaccacgctgggcgcccccagagcccacaccatgccgggcacctacgctccctcgaccacactcagtagtcccagcacccagggcctgcaagagcaggcacgggccctgatgcgggacttcccgctcgtggacggccacaacgacctgcccctggtcctaaggcaggtttaccagaaagggctacaggatgttaacctgcgcaatttcagctacggccagaccagcctggacaggcttagagatggcctcgtgggcgcccagttctggtcagcctatgtgccatgccagacccaggaccgggatgccctgcgcctcaccctggagcagattgacctcatacgccgcatgtgtgcctcctattctgagctggagcttgtgacctcggctaaagctctgaacgacactcagaaattggcctgcctcatcggtgtagagggtggccactcgctggacaatagcctctccatcttacgtaccttctacatgctgggagtgcgctacctgacgctcacccacacctgcaacacaccctgggcagagagctccgctaagggcgtccactccttctacaacaacatcagcgggctgactgactttggtgagaaggtggtggcagaaatgaaccgcctgggcatgatggtagacttatcccatgtctcagatgctgtggcacggcgggccctggaagtgtcacaggcacctgtgatcttctcccactcggctgcccggggtgtgtgcaacagtgctcggaatgttcctgatgacatcctgcagcttctgaagaagaacggtggcgtcgtgatggtgtctttgtccatgggagtaatacagtgcaacccatcagccaatgtgtccactgtggcagatcacttcgaccacatcaaggctgtcattggatccaagttcatcgggattggtggagattatgatggggccggcaaattccctcaggggctggaagacgtgtccacatacccggtcctgatagaggagttgctgagtcgtggctggagtgaggaagagcttcagggtgtccttcgtggaaacctgctgcgggtcttcagacaagtggaaaaggtacaggaagaaaacaaatggcaaagccccttggaggacaagttcccggatgagcagctgagcagttcctgccactccgacctctcacgtctgcgtcagagacagagtctgacttcaggccaggaactcactgagattcccatacactggacagccaagttaccagccaagtggtcagtctcagagtcctccccccacatggccccagtccttgcagttgtggccaccttcccagtccttattctgtggctctga

SEQ ID NO: 271 - DNA, 1176 bp, Homo sapiens;
atggcggctgtggtggagaatgtagtgaagctccttggggagcagtactacaaagatgccatggagcagtgccacaattacaatgctcgcctctgtgctgagcgcagcgtgcgcctgcctttcttggactcacagaccggagtagcccagagcaattgttacatctggatggaaaagcgacaccggggtccaggattggcctccggacagctgtactcctaccctgcccggcgctggcggaaaaagcggcgagcccatccccctgaggatccacgactttccttcccatctattaagccagacacagaccagaccctgaagaaggaggggctgatctctcaggatggcagtagtttagaggctctgttgcgcactgaccccctggagaagcgaggtgccccggatccccgagttgatgatgacagcctgggcgagtttcctgtgaccaacagtcgagcgcgaaagcggatcctagaaccagatgacttcctggatgacctcgatgatgaagactatgaagaagatactcccaagcgtcggggaaaggggaaatccaagggtaagggtgtgggcagtgcccgtaagaagctggatgcttccatcctggaggaccgggataagccctatgcctgtgacatttgtggaaaacgttacaagaaccgaccaggcctcagttaccactatgcccactcccacttggctgaggaggagggcgaggacaaggaagactctcaaccacccactcctgtttcccagaggtctgaggagcagaaatccaaaaagggtcctgatggattggccttgcccaacaactactgtgacttctgcctgggggactcaaagattaacaagaagacgggacaacccgaggagctggtgtcctgttctgactgtggccgctcagggcatccatcttgcctccaatttacccccgtgatgatggcggcagtgaagacataccgctggcagtgcatcgagtgcaaatgttgcaatatctgcggcacctccgagaatgacgaccagttgctcttctgtgatgactgcgatcgtggctaccacatgtactgtctcaccccgtccatgtctgagccccctgaaggaagttggagctgccacctgtgtctggacctgttgaaagagaaagcttccatctaccagaaccagaactcctcttga

SEQ ID NO: 272 - DNA, 1656 bp, Homo sapiens;
atggctggtgatctttcagcaggtttcttcatggaggaacttaatacataccgtcagaagcagggagtagtacttaaatatcaagaactgcctaattcaggacctccacatgataggaggtttacatttcaagttataatagatggaagagaatttccagaaggtgaaggtagatcaaagaaggaagcaaaaaatgccgcagccaaattagctgttgagatacttaataaggaaaagaaggcagttagtcctttattattgacaacaacgaattcttcagaaggattatccatggggaattacataggccttatcaatagaattgcccagaagaaaagactaactgtaaattatgaacagtgtgcatcgggggtgcatgggccagaaggatttcattataaatgcaaaatgggacagaaagaatatagtattggtacaggttctactaaacaggaagcaaaacaattggccgctaaacttgcatatcttcagatattatcagaagaaacctcagtgaaatctgactacctgtcctctggttcttttgctactacgtgtgagtcccaaagcaactctttagtgaccagcacactcgcttctgaatcatcatctgaaggtgacttctcagcagatacatcagagataaattctaacagtgacagtttaaacagttcttcgttgcttatgaatggtctcagaaataatcaaaggaaggcaaaaagatctttggcacccagatttgaccttcctgacatgaaagaaacaaagtatactgtggacaagaggtttggcatggattttaaagaaatagaattaattggctcaggtggatttggccaagttttcaaagcaaaacacagaattgacggaaagacttacgttattaaacgtgttaaatataataacgagaaggcggagcgtgaagtaaaagcattggcaaaacttgatcatgtaaatattgttcactacaatggctgttgggatggatttgattatgatcctgagaccagtgatgattctcttgagagcagtgattatgatcctgagaacagcaaaaatagttcaaggtcaaagactaagtgccttttcatccaaatggaattctgtgataaagggaccttggaacaatggattgaaaaaagaagaggcgagaaactagacaaagttttggctttggaactctttgaacaaataacaaaaggggtggattatatacattcaaaaaaattaattcatagagatcttaagccaagtaatatattcttagtagatacaaaacaagtaaagattggagactttggacttgtaacatctctgaaaaatgatggaaagcgaacaaggagtaagggaactttgcgatacatgagcccagaacagatttcttcgcaagactatggaaaggaagtggacctctacgctttggggctaattcttgctgaacttcttcatgtatgtgacactgcttttgaaacatcaaagtttttcacagacctacgggatggcatcatctcagatatatttgataaaaaagaaaaaactcttctacagaaattactctcaaagaaacctgaggatcgacctaacacatctgaaatactaaggaccttgactgtgtggaagaaaagcccagagaaaaatgaacgacacacatgttag

SEQ ID NO: 273 - DNA, 1059 bp, Homo sapiens;
atggcgtcccgcaaggaaggtaccggctctactgccacctcttccagctccaccgccggcgcagcagggaaaggcaaaggcaaaggcggctcgggagattcagccgtgaagcaagtgcagatagatggccttgtggtattaaagataatcaaacattatcaagaagaaggacaaggaactgaagttgttcaaggagtgcttttgggtctggttgtagaagatcggcttgaaattaccaactgctttcctttccctcagcacacagaggatgatgctgactttgatgaagtccaatatcagatggaaatgatgcggagccttcgccatgtaaacattgatcatcttcacgtgggctggtatcagtccacatactatggctcattcgttacccgggcactcctggactctcagtttagttaccagcatgccattgaagaatctgtcgttctcatttatgatcccataaaaactgcccaaggatctctctcactaaaggcatacagactgactcctaaactgatggaagtttgtaaagaaaaggatttttcccctgaagcattgaaaaaagcaaatatcacctttgagtacatgtttgaagaagtgccgattgtaattaaaaattcacatctgatcaatgtcctaatgtgggaacttgaaaagaagtcagctgttgcagataaacatgaattgctcagccttgccagcagcaatcatttggggaagaatctacagttgctgatggacagagtggatgaaatgagccaagatatagttaaatacaacacatacatgaggaatactagtaaacaacagcagcagaaacatcagtatcagcagcgtcgccagcaggagaatatgcagcgccagagccgaggagaacccccgctccctgaggaggacctgtccaaactcttcaaaccaccacagccgcctgccaggatggactcgctgctcattgcaggccagataaacacttactgccagaacatcaaggagttcactgcccaaaacttaggcaagctcttcatggcccaggctcttcaagaatacaacaactaa

SEQ ID NO: 274 - DNA, 2472 bp, Homo sapiens;
atgggaggccgcgtctttctcgtctttctcgcattctgtgtctggctgactctgccgggagctgaaacccaggactccaggggctgtgcccggtggtgccctcaggactcctcgtgtgtcaatgccaccgcctgtcgctgcaatccagggttcagctctttttctgagatcatcaccacccccatggagacttgtgacgacatcaacgagtgtgcaacactgtcgaaagtgtcatgcggaaaattctcggactgctggaacacagaggggagctacgactgcgtgtgcagcccaggatatgagcctgtttctggggcaaaaacattcaagaatgagagcgagaacacgtgtcaagatgtggacgaatgtcagcagaacccaaggctctgtaaaagctacggcacctgcgtcaacaccctcggcagctacacgtgccagtgcctgcctggcttcaagctcaaacctgaggacccgaagctctgcacagatgtgaatgaatgcacctccggacaaaacccatgccacagctccacccactgcctcaacaacgtgggcagctatcagtgccgctgccgcccgggctggcaaccgattccggggtcccccaatggcccaaacaataccgtctgtgaagatgtggacgagtgcagctccgggcagcatcagtgtgacagctccaccgtctgcttcaacaccgtgggttcatacagctgccgctgccgcccaggctggaagcccagacacggaatcccgaataaccaaaaggacactgtctgtgaagatatgactttctccacctggaccccgccccctggagtccacagccagacgctttcccgattcttcgacaaagtccaggacctgggcagagactacaagccaggcttggccaataacaccatccagagcatcttacaggcgctggatgagctgctggaggcccctggggacctggagaccctgccccgcttacagcagcactgtgtggccagtcacctgctggatggcctagaggatgtcctcagaggcctgagcaagaacctttccaatgggctgttgaacttcagttatcctgcaggcacagaattgtccctggaggtgcagaagcaagtagacaggagtgtcaccttgagacagaatcaggcagtgatgcagctcgactggaatcaggcacagaaatctggtgacccaggcccttctgtggtgggccttgtctccattccagggatgggcaagttgctggctgaggcccctctggtcctggaacctgagaagcagatgcttctgcatgagacacaccagggcttgctgcaggacggctcccccatcctgctctcagatgtgatctctgcctttctgagcaacaacgacacccaaaacctcagctccccagttaccttcaccttctcccaccgttcagtgatcccgagacagaaggtgctctgtgtcttctgggagcatggccagaatggatgtggtcactgggccaccacaggctgcagcacaataggcaccagagacaccagcaccatctgccgttgcacccacctgagcagctttgccgtcctcatggcccactacgatgtgcaggaggaggatcccgtgctgactgtcatcacctacatggggctgagcgtctctctgctgtgcctcctcctggcggccctcacttttctcctgtgtaaagccatccagaacaccagcacctcactgcatctgcagctctcgctctgcctcttcctggcccacctcctcttcctcgtggcaattgatcaaaccggacacaaggtgctgtgctccatcatcgccggtaccttgcactatctctacctggccaccttgacctggatgctgctggaggccctgtacctcttcctcactgcacggaacctgacggtggtcaactactcaagcatcaacagattcatgaagaagctcatgttccctgtgggctacggagtcccagctgtgacagtggccatttctgcagcctccaggcctcacctttatggaacaccttcccgctgctggctccaaccagaaaagggatttatatggggcttccttggacctgtctgcgccatcttctctgtgaatttagttctctttctggtgactctctggattttgaaaaacagactctcctccctcaatagtgaagtgtccaccctccggaacacaaggatgctggcatttaaagcgacagctcagctgttcatcctgggctgcacgtggtgtctgggcatcttgcaggtgggtccggctgcccgggtcatggcctacctcttcaccatcatcaacagcctgcagggtgtcttcatcttcctggtgtactgcctcctcagccagcaggtccgggagcaatatgggaaatggtccaaagggatcaggaaattgaaaactgagtctgagatgcacacactctccagcagtgctaaggctgacacctccaaacccagcacggttaactag

SEQ ID NO: 275 - DNA, 4116 bp, Homo sapiens;
atgactacaaaacgaagtttgtttgtgcggttggtaccatgtcgctgtctacgaggggaagaggagactgtcactactcttgattattctcattgcagcttagaacaagttccgaaagagatttttacttttgaaaaaaccttggaggaactctatttagatgctaatcagattgaagagcttccaaagcaactttttaactgtcagtctttacacaaactgagtttgccagacaatgatttaacaacgttaccagcatccattgcaaaccttattaatctcagggaactggatgtcagcaagaatggaatacaggagtttccagaaaatataaaaaattgtaaagttttgacaattgtggaggccagtgtaaaccctatttccaagctccctgatggattttctcagctgttaaacctaacccagttgtatctgaatgatgcttttcttgagttcttgccagcaaattttggcagattaactaaactccaaatattagagcttagagaaaaccagttaaaaatgttgcctaaaactatgaatagactgacccagctggaaagactggatttgggaagtaacgaattcacggaagtgcctgaagtacttgagcaactaagtggattgaaagagttttggatggatgctaatagactgacttttattccagggtttattggtagtttgaaacagctcacatatttggatgtttctaaaaataatattgaaatggttgaagaaggaatttcaacatgtgaaaaccttcaagacctcctattatcaagcaattcacttcagcagcttcctgagactattggttcgttgaagaatataacaacgcttaaaatagatgaaaaccagttaatgtatctgccagactctataggagggttaatatcagtagaagaactggattgtagtttcaatgaagttgaagctttgccttcatctattgggcagcttactaacttaagaacttttgctgctgatcataattacttacagcagttgcccccagagattggaagctggaaaaatataactgtgctgtttctccattccaataaacttgagacacttccagaggaaatgggtgatatgcaaaaattaaaagtcattaatttaagtgataatagattaaagaatttaccctttagctttacaaagctacagcaattgacagctatgtggctctcagataatcagtccaaacccctgatacctcttcaaaaagaaactgattcagagacccagaaaatggtgcttaccaactacatgttccctcaacagccaaggactgaggatgttatgtttatatcagataatgaaagttttaacccttcattgtgggaggaacagaggaaacagcgggctcaagttgcatttgaatgtgatgaagacaaagatgaaagggaggcacctcccagggagggaaatttaaaaagatatccaacaccatacccagatgagcttaagaatatggtcaaaactgttcaaaccattgtacatagattaaaagatgaagagaccaatgaagactcaggaagagatttgaaaccacatgaagatcaacaagatataaataaagatgtgggtgtgaagacctcagaaagtactactacagtaaaaagcaaagttgatgaaagagaaaaatatatgataggaaactctgtacagaagatcagtgaacctgaagctgagattagtcctgggagtttaccagtgactgcaaatatgaaagcctctgagaacttgaagcatattgttaaccatgatgatgtttttgaggaatctgaagaactttcttctgatgaagagatgaaaatggcggagatgcgaccaccattaattgaaacctctattaaccagccaaaagtcgtagcacttagtaataacaaaaaagatgatacaaaggaaacagattctttatcagatgaagttacacacaatagcaatcagaataacagcaattgttcttctccatctcggatgtctgattcagtttctcttaatactgatagtagtcaagacacctcactctgctctccagtgaaacaaactcatattgatattaattccaaaatcaggcaagaagatgaaaattttaacagccttttacaaaatggagatattttaaacagttcaacagaggaaaagttcaaagctcatgataaaaaagattttaacttacctgaatatgatttgaatgttgaagagcgattagttctaattgagaaaagtgttgactcaacagccacagctgatgacactcacaaattagatcatatcaatatgaatcttaataaacttataactaatgatacatttcaaccagagatcatggaaagatcaaaaacacaggatattgtgcttggaacaagctttttaagcattaattctaaagaggaaactgagcacttggaaaatggaaacaagtatcctaatttggaatccgtaaataaggtaaatggacattctgaggaaacttcccagtctcctaataggactgaaccacatgacagtgattgttctgttgacttaggtatttccaaaagcactgaagatctctcccctcagaaaagtggtccagttggatctgttgtgaaatctcatagcataactaatatggagattggagggctaaaaatctatgatattcttagtgataatggacctcagcagccaagtacaaccgttaaaatcacatctgctgttgatggaaaaaatatagtcaggagcaagtctgccacactgttgtatgatcaaccattgcaggtatttactggttcttcctcatcttctgatttaatatcaggaacaaaggcaattttcaagtttgattcaaatcataatcccgaagagccaaatataataagaggccccacaagtggcccacaatctgcacctcaaatatatggtcctccacagtataatatccaatacagtagcagtgctgcagtcaaagacactttgtggcactccaaacaaaatccccaaatagaccatgccagttttcctcctcagctccttcctagatcagagagcacagaaaatcaaagttatgctaaacattctgccaatatgaatttctctaatcataacaatgttcgagctaatactgcataccatttacatcagagacttggcccagcaagacatggggaaatgtgggccatctcaccaaacgaccgacttattcctgcagtaactcgaagtacaatccagcgacaaagtagtgtgtcctccacagcctctgtaaatcttggtgatccaggctctacaaggcgggctcagattcctgaaggagattatttatcatacagagagttccactcagcgggaagaactcctccaatgatgccaggatcacagagacccctttctgcacgaacatacagcatagatggtccaaatgcatcaagacctcagagtgctcgaccctctattaatgaaataccagagagaactatgtcagttagtgatttcaattattcacggactagtccttcaaaaagaccaaatgcaagggttggttctgagcattctttattagatcctccaggaaaaagtaaagttcctcgtgactggagagaacaagtacttcgacatattgaagccaaaaagttagaaaagatgcctttgagtaatggacagatgggccagcctctcaggcctcaggcaaattatagtcaaatacatcacccccctcaggcatctgtggcaaggcatccctctagagaacaactaattgattacttgatgctgaaagtggcccaccagcctccatatacacagccccattgttctcctagacaaggccatgaactggcaaaacaagagattcgagtgagggttgaaaaggatccagaacttggatttagcatatcaggtggtgtcgggggtagaggaaacccattcagacctgatgatgatggtatatttgtaacaagggtacaacctgaaggaccagcatcaaaattactgcagccaggtgataaaattattcaggctaatggctacagttttataaatattgaacatggacaagcagtgtccttgctaaaaactttccagaatacagttgaactcatcattgtacgagaagtttcctcataa

SEQ ID NO: 276 - DNA, 1410 bp, Homo sapiens;
atgaatgatttcggaatcaagaatatggaccaggtagcccctgtggctaacagttacagagggacactcaagcgccagccagcctttgacacctttgatgggtccctgtttgctgtttttccttctctaaatgaagagcaaacactgcaagaagtgccaacaggcttggattccatttctcatgactccgccaactgtgaattgcctttgttaaccccgtgcagcaaggctgtgatgagtcaagccttaaaagctaccttcagtggcttcaaaaaggaacagcggcgcctgggcattccaaagaacccctggctgtggagtgagcaacaggtatgccagtggcttctctgggccaccaatgagttcagtctggtgaacgtgaatctgcagaggttcggcatgaatggccagatgctgtgtaaccttggcaaggaacgctttctggagctggcacctgactttgtgggtgacattctctgggaacatctggagcaaatgatcaaagaaaaccaagaaaagacagaagatcaatatgaagaaaattcacacctcacctccgttcctcattggattaacagcaatacattaggttttggcacagagcaggcgccctatggaatgcagacacagaattaccccaaaggcggcctcctggacagcatgtgtccggcctccacacccagcgtactcagctctgagcaggagtttcagatgttccccaagtctcggctcagctccgtcagcgtcacctactgctctgtcagtcaggacttcccaggcagcaacttgaatttgctcaccaacaattctgggactcccaaagaccacgactcccctgagaacggtgcggacagcttcgagagctcagactccctcctccagtcctggaacagccagtcgtccttgctggatgtgcaacgggttccttccttcgagagcttcgaagatgactgcagccagtctctctgcctcaataagccaaccatgtctttcaaggattacatccaagagaggagtgacccagtggagcaaggcaaaccagttatacctgcagctgtgctggccggcttcacaggaagtggacctattcagctgtggcagtttctcctggagctgctatcagacaaatcctgccagtcattcatcagctggactggagacggatgggagtttaagctcgccgaccccgatgaggtggcccgccggtggggaaagaggaaaaataagcccaagatgaactacgagaagctgagccggggcttacgctactattacgacaagaacatcatccacaagacgtcggggaagcgctacgtgtaccgcttcgtgtgcgacctccagaacttgctggggttcacgcccgaggaactgcacgccatcctgggcgtccagcccgacacggaggactga

SEQ ID NO: 277 - DNA, 1173 bp, Homo sapiens;
atggacttctggctttggccactttacttcctgccagtatcgggggccctgaggatcctcccagaagtaaaggtagagggggagctgggcggatcagttaccatcaagtgcccacttcctgaaatgcatgtgaggatatatctgtgccgggagatggctggatctggaacatgtggtaccgtggtatccaccaccaacttcatcaaggcagaatacaagggccgagttactctgaagcaatacccacgcaagaatctgttcctagtggaggtaacacagctgacagaaagtgacagcggagtctatgcctgcggagcgggcatgaacacagaccggggaaagacccagaaagtcaccctgaatgtccacagtgaatacgagccatcatgggaagagcagccaatgcctgagactccaaaatggtttcatctgccctatttgttccagatgcctgcatatgccagttcttccaaattcgtaaccagagttaccacaccagctcaaaggggcaaggtccctccagttcaccactcctcccccaccacccaaatcacccaccgccctcgagtgtccagagcatcttcagtagcaggtgacaagccccgaaccttcctgccatccactacagcctcaaaaatctcagctctggaggggctgctcaagccccagacgcccagctacaaccaccacaccaggctgcacaggcagagagcactggactatggctcacagtctgggagggaaggccaaggatttcacatcctgatcccgaccatcctgggccttttcctgctggcacttctggggctggtggtgaaaagggccgttgaaaggaggaaagccctctccaggcgggcccgccgactggccgtgaggatgcgcgccctggagagctcccagaggccccgcgggtcgccgcgaccgcgctcccaaaacaacatctacagcgcctgcccgcggcgcgctcgtggagcggacgctgcaggcacaggggaggcccccgttcccggccccggagcgccgttgccccccgccccgctgcaggtgtctgaatctccctggctccatgccccatctctgaagaccagctgtgaatacgtgagcctctaccaccagcctgccgccatgatggaggacagtgattcagatgactacatcaatgttcctgcctga

SEQ ID NO: 278 - DNA, 1632 bp, Homo sapiens;
atggcgagcggcggtggcgggggtaacactggcgcgggtggggggccggggatgggcctgagcctgggcctgggtctgggtctgagcctaggcatgagtgaggccaccagtgaggcagaggaggaggcggccacggccgaggcggtgggacgcctggccacgacgctgtggctgcggctccgcggctgggaggcggtgctggcggcggcgcagcggttgctggtgtgggagaagccgctgcacagcctggtcacggcggccgcgctcaacggcctcttctggttgctgtcttcctcgtccctccggcccttcttcctactcagcgtctcacttttggcctattttctgctggatctctggcagcctcgctttctccctgacgtttcagcatcatccccagaggagccacactctgacagtgagggtgcggggtcaggcgcccggccgcacctgctgagtgtgcccgagttgtgcagatacctggctgagagctggctcaccttccagattcacctgcaggagctgctgcagtacaagaggcagaatccagctcagttctgcgttcgagtctgctctggctgtgctgtgttggctgtgttgggacactatgttccagggattatgatttcctacattgtcttgttgagtatcctgctgtggcccctggtggtttatcatgagctgatccagaggatgtacactcgcctggagcccctgctcatgcagctggactacagcatgaaggcagaagccaatgccctgcatcacaaacacgacaagaggaagcgtcaggggaagaatgcacccccaggaggtgatgagccactggcagagacagagagtgaaagcgaggcagagctggctggcttctccccagtggtggatgtgaagaaaacagcattggccttggccattacagactcagagctgtcagatgaggaggcttctatcttggagagtggtggcttctccgtatcccgggccacaactccgcagctgactgatgtctccgaggatttggaccagcagagcctgccaagtgaaccagaggagaccctaagccgggacctaggggagggagaggagggagagctggcccctcccgaagacctactaggccgtcctcaagctctgtcaaggcaagccctggactcggaggaagaggaagaggatgtggcagctaaggaaaccttgttgcggctctcatcccccctccactttgtgaacacgcacttcaatggggcagggtcccccccagatggagtgaaatgctcccctggaggaccagtggagacactgagccccgagacagtgagtggtggcctcactgctctgcccggcaccctgtcacctccactttgccttgttggaagtgacccagccccctccccttccattctcccacctgttccccaggactcaccccagcccctgcctgcccctgaggaagaagaggcactcaccactgaggactttgagttgctggatcagggggagctggagcagctgaatgcagagctgggcttggagccagagacaccgccaaaaccccctgatgctccacccctggggcccgacatccattctctggtacagtcagaccaagaagctcaggccgtggcagagccatga

SEQ ID NO: 279 - DNA, 3207 bp, Homo sapiens;
atgttggtaggatcccagtctttttcgcctggagggcccaatgggatcattagaagccagtcctttgcgggtttcagcggcctccaggaaaggcgatccaggtgtaactccttcattgaaaattcctccgctctcaagaagcctcaggccaaactgaagaaaatgcacaatttaggccacaaaaacaacaatccccccaaagagcctcagcctaaaagggtggaagaagtctacagggccttgaaaaatggacttgatgaatatctggaggttcaccagacggagctggacaagttgacagctcagttaaaagatatgaaaagaaactctcgcctgggtgtactgtatgacctagacaagcaaattaaaacaattgaaagatacatgagacgcctggagtttcatataagtaaggtagatgaactctatgaagcttattgtatccagcgacgcctccaggatggtgccagcaaaatgaagcaagccttcgcaacatcccctgccagcaaagctgcccgggagagtctgacagagatcaatcggagcttcaaggagtacacagagaatatgtgcaccattgaagtggagctagagaatctgctgggagaattctccatcaagatgaaaggtctggctggctttgcacgcctctgtcctggagatcaatatgaaattttcatgaagtatggccggcagcggtggaaactgaaaggcaaaatagaagtaaatggcaagcagagctgggatggagaagaaacagtttttctgcccctgatagttgggttcatctccatcaaggtcacggagctcaaagggctagcaactcacatcctggtaggtagcgtgacctgtgagaccaaagagctgtttgcagcccgacctcaggtagtggctgtcgacatcaatgaccttggtaccatcaaactgaacctggaaatcacctggtatccatttgacgtggaggacatgaccgcatcctcaggcgctgggaacaaggcagcagcccttcagaggagaatgtccatgtacagccagggtaccccggaaacgcccaccttcaaagaccactccttctttaggtggctgcatccttccccagacaagcccaggcggctgtctgtcttgagtgccttgcaagacactttctttgccaagctgcaccgcagccgctccttcagtgacctgccctccctcaggccgagtcccaaggccgtgctagagctctattcaaatctacctgatgacatctttgaaaatggaaaggcagccgaggagaaaatgccactgtcgctcagcttcagtgacctgcccaacggggactgcgccctcacctcccactcaacaggctccccttccaactcaacaaatccagaaattaccatcacccctgcggagtttaacctcagcagcttggcctcccagaatgagggtatggatgacaccagctcagcatcttccaggaactccctgggagaaggccaagagccaaagtcacacctgaaggaggaagacccagaggagcccagaaaacctgcctcggccccatctgaggcttgccgccgacagtcctcaggtgctggggctgagcacctgttccttgagaatgatgttgcagaagcacttctgcaagagtctgaggaggcctctgagctcaagcctgtggaactggacacttcggaaggaaacatcacaaagcagctggtcaagaggctcacatctgcagaggtgccaatggccacagacaggctgctctctgagggttctgttggtggagaatctgaaggctgcagatcctttctagatggaagcttagaggatgcttttaatgggcttttacttgcattagaaccacataaagagcagtataaagagtttcaggatctgaaccaagaagtcatgaatttggatgatattctaaaatgcaagccagcagtaagccgcagcaggtcttccagtttaagtctcacagttgaaagtgctttagaaagctttgatttcctgaacacctctgattttgacgaggaggaggatggtgatgaggtttgtaatgttggcggaggtgctgactcagtattttcagacactgagactgagaaacacagttacaggtcggttcacccagaagccagggggcatctcagtgaagcgctcactgaagacacaggagttgggaccagtgtggcaggaagtcctctcccactgaccacaggcaacgagagcctggacatcaccatcgtcaggcacctccagtactgcacccaactcgtgcagcaaattgttttctcaagcaaaaccccatttgtggcaagaagtctcttagagaagctttctaggcagatccaagtgatggagaaactcgcagctgtcagtgatgagaacataggaaatatcagttctgttgtggaagccataccagaatttcacaaaaagctgtctttgctgtcattctggaccaagtgctgcagccctgttggtgtctaccacagcccagcggacagagtgatgaagcagctggaggccagctttgccagaactgtcaacaaagaatatccaggacttgcagacccagtgtttcgaaccctggtgtcccaaattctggaccgggctgagcctctgctttcctccagcctgtcctcggaagtcgtcactgttttccagtattacagttacttcaccagccacggcgtcagtgacctggagagttacctgagccagctggccaggcaagtttccatggttcagactctgcaatcactaagagatgaaaaactgctacaaaccatgagtgaccttgctcccagcaacctcctggcccagcaggaagtactcaggactctggctctgctattaaccagagaggacaacgaagttagtgaggctgtgacgctttacttggcagcagcctccaaaaatcagcatttcagggaaaaggccttgctctattactgtgaagcactaacaaagacaaacctccagctccagaaagcagcttgcctggctctgaaaatccttgaggctactgaaagcattaaaatgctggtgacattgtgtcaatctgatactgaagaaatcagaaatgtggcctcagaaaccctcttgtctctgggagaagatgggcggctggcatatgaacaattggacaaatttcctcgagactgtgttaaagtcggaggtcgtcatggaactgaagttgccacagccttttaa

SEQ ID NO: 280 - DNA, 2532 bp, Homo sapiens;
atggttgcagaagaatcaggtcctggtgcacaaaatagtccataccaacttcgtagaaaaactcttttgccgaaaagaacagcgtgtcccacaaagaacagtatggagggcgcctcaacttcaactacagaaaactttggtcatcgtgcaaaacgtgcaagagtgtctggaaaatcacaagatctatcagcagcacctgctgaacagtatcttcaggagaaactgccagatgaagtggttctaaaaatcttctcttacttgctggaacaggatctttgtagagcagcttgtgtatgtaaacgcttcagtgaacttgctaatgatccaattttgtggaaacgattatatatggaagtatttgaatatactcgccctatgatgcatcctgaacctggaaaattctaccagattaatccagaagagtatgaacatccaaatccctggaaagagagtttccagcagttgtataaaggtgcacatgtaaagccaggatttgctgaacatttctacagtaaccctgcaagatataaaggaagagaaaatatgttgtattatgatactattgaagatgcccttggtggggtacaagaggctcattttgatggacttatctttgttcattctggaatatatactgatgaatggatatatattgaatctccaatcaccatgattggtgcagcacctgggaaagtggcagacaaagttataattgaaaacactagagattcaaccttcgtttttatggaaggctctgaagatgcttatgttggatatatgacaataaggtttaaccctgatgacaaatctgcacaacaccacaatgcacaccactgcttagagattacagtaaattgtagccctattattgatcactgtatcatccgaagtacatgtacagttggttctgcagtatgtgttagtggtcaaggagcatgtcccaccatcaagcactgtaacatcagtgactgtgaaaatgttggactatatataacagatcatgcacagggaatatatgaggataatgaaatttccaataatgcgttagctgggatttgggttaaaaatcatggaaacccaattattagacggaatcatattcatcatggacgtgatgttggtgtgttcacatttgatcatggcatgggttactttgaaagttgcaatatacacagaaataggatagcaggctttgaagtaaaagcctatgctaaccctacagtggttcgatgtgaaattcaccatgggcagactggaggaatatatgtccatgaaaaaggaagaggacaattcatagagaataaaatctatgcaaacaactttgcaggtgtatggattacctcaaatagtgacccaacaataaggggaaattctatatttaatggaaatcaaggaggagtttacatctttggtgatggacgaggccttattgaaggaaatgacatttatggcaatgcattagcaggaattcaaattaggacaaacagttgtccaattgttcggcataacaaaattcatgatggccagcatggtgggatttatgtgcatgaaaagggacaaggagtaatagaagagaatgaagtttatagtaacactctagctggagtctgggtgacaactggcagcactccagtactgagaagaaaccggatacacagtggcaagcaggttggtgtttatttttatgacaatggacatggagtgctagaagacaatgatatctataatcatatgtattcaggggttcagataaggactggaagcaaccccaaaattagacgcaacaaaatctggggaggacagaatggtggaattctagtttataattctggtctaggctgtatagaagacaatgaaatatttgacaatgcaatggctggagtctggattaagacagatagtaatcctacactaagaagaaataaaatccatgatggaagagatggtggcatctgtatatttaatgggggtcgaggtctccttgaagaaaatgatattttcaggaatgctcaagcaggtgttctcatcagcactaatagtcatccaatcttaaggaaaaacagaatatttgatggatttgccgcaggtattgaaattacaaatcacgcaactgcaacactagaaggcaatcagatttttaacaaccggtttggaggcttatttttagcatctggtgttaatgtgacaatgaaagataacaaaataatgaacaatcaagatgccatagaaaaggctgttagtagaggccaatgtttatataaaatatcaagttataccagctatcccatgcatgatttctacagatgtcatacttgtaacaccacagatcgaaatgccatatgtgtgaactgcattaagaagtgccatcagggacatgatgtagagtttattagacatgataggtttttctgtgactgtggtgctggaacactgtctaatccttgtacattagctggtgagcctacacatgatacagatacactatatgactctgctccacctatagaatctaatacattgcagcacaactga

SEQ ID NO: 281 - DNA, 1344 bp, Homo sapiens;
atgcctgacattatttgggttttcccccctcaggcagaagctgaggaagattgtcattctgatactgtcagagcagatgatgatgaagaaaatgaaagtcctgctgaaacagatctgcaggcacaactccagatgttccgagctcagtggatgtttgaacttgctccaggtgtaagctctagcaatttagaaaatcgaccttgcagagcagcaagaggctctctccagaaaacatcggcagataccaaaggaaaacaagaacaggcaaaagaagaaaaggctcgagaactcttcctaaaagcagtagaagaagaacaaaatggagctctctatgaagccatcaagttttatcgtagggctatgcaacttgtacctgatatagagttcaagattacttatacccggtctccagatggtgatggcgttggaaacagctacattgaagataatgatgatgacagcaaaatggcagatctcttgtcctacttccagcagcaactcacatttcaggagtctgtgcttaaactgtgtcagcctgagcttgagagcagtcagattcacatatcagtgctgccaatggaggtcctgatgtacatcttccgatgggtggtgtctagtgacttggacctcagatcattggagcagttgtcgctggtgtgcagaggattctacatctgtgccagagaccctgaaatatggcgtctggcctgcttgaaagtttggggcagaagctgtattaaacttgttccgtacacgtcctggagagagatgtttttagaacggcctcgtgttcggtttgatggcgtgtatatcagtaaaaccacatatattcgtcaaggggaacagtctcttgatggtttctatagagcctggcaccaagtggaatattacaggtacataagattctttcctgatggccatgtgatgatgttgacaacccctgaagagcctcagtccattgttccacgtttaagaactaggaataccaggactgatgcaattctactgggtcactatcgcttgtcacaagacacagacaatcagaccaaagtatttgctgtaataactaagaaaaaagaagaaaaaccacttgactataaatacagatattttcgtcgtgtccctgtacaagaagcagatcagagttttcatgtggggctacagctatgttccagtggtcaccagaggttcaacaaactcatctggatacatcattcttgtcacattacttacaaatcaactggtgagactgcagtcagtgcttttgagattgacaagatgtacacccccttgttcttcgccagagtaaggagctacacagctttctcagaaaggcctctgtag

SEQ ID NO: 282 - DNA, 1098 bp, Homo sapiens;
atgggggtcccgcggcctcagccctgggcgctggggctcctgctctttctccttcctgggagcctgggcgcagaaagccacctctccctcctgtaccaccttaccgcggtgtcctcgcctgccccggggactcctgccttctgggtgtccggctggctgggcccgcagcagtacctgagctacaatagcctgcggggcgaggcggagccctgtggagcttgggtctgggaaaaccaggtgtcctggtattgggagaaagagaccacagatctgaggatcaaggagaagctctttctggaagctttcaaagctttggggggaaaaggtccctacactctgcagggcctgctgggctgtgaactgggccctgacaacacctcggtgcccaccgccaagttcgccctgaacggcgaggagttcatgaatttcgacctcaagcagggcacctggggtggggactggcccgaggccctggctatcagtcagcggtggcagcagcaggacaaggcggccaacaaggagctcaccttcctgctattctcctgcccgcaccgcctgcgggagcacctggagaggggccgcggaaacctggagtggaaggagcccccctccatgcgcctgaaggcccgacccagcagccctggcttttccgtgcttacctgcagcgccttctccttctaccctccggagctgcaacttcggttcctgcggaatgggctggccgctggcaccggccagggtgacttcggccccaacagtgacggatccttccacgcctcgtcgtcactaacagtcaaaagtggcgatgagcaccactactgctgcattgtgcagcacgcggggctggcgcagcccctcagggtggagctggaatctccagccaagtcctccgtgctcgtggtgggaatcgtcatcggtgtcttgctactcacggcagcggctgtaggaggagctctgttgtggagaaggatgaggagtgggctgccagccccttggatctcccttcgtggagacgacaccggggtcctcctgcccaccccaggggaggcccaggatgctgatttgaaggatgtaaatgtgattccagccaccgcctga

SEQ ID NO: 283 - DNA, 2469 bp, Homo sapiens;
atgggcttctcttccgagctgtgcagcccccagggccacggggtcctgcagcaaatgcaggaggccgagcttcgtctactggagggcatgagaaagtggatggcccagcgggtcaagagtgacagggagtatgcaggactgcttcaccacatgtccctgcaggacagtgggggccagagccgggccatcagccctgacagccccatcagtcagtcctgggctgagatcaccagccaaactgagggcctgagccgcttgctgcggcagcacgcagaggatctgaactcagggcccctgagcaagctgagcctgctcatccgggaacggcagcagcttcgcaagacctacagcgagcagtggcagcagctgcagcaggagctcaccaagacccacagccaggacattgagaagctgaagagccagtaccgagctctggcacgggacagtgcccaagccaagcgcaagtaccaggaggccagcaaagacaaggaccgtgacaaggctaaggacaagtatgtgcgcagcctgtggaagctctttgctcaccacaaccgctatgtgctgggcgtgcgggctgcgcagctacaccaccagcaccaccaccagctcctgctgcccggcctgctgcggtcactgcaggacctgcacgaggagatggcttgcatcctgaaggagatcctgcaggaatacctggagattagcagcctggtgcaggatgaggtggtggccattcaccgggagatggctgcagctgctgcccgcatccagcctgaggctgagtaccaaggcttcctgcgacagtatgggtccgcacctgacgtcccaccctgtgtcacgttcgatgagtcactgcttgaggagggtgaaccgctggagcctggggagctccagctgaacgagctgactgtggagagcgtgcagcacacgctgacctcagtgacagatgagctggctgtggccaccgagatggtgttcaggcggcaggagatggttacgcagctgcaacaggagctccggaatgaagaggagaacacccacccccgggagcgggtgcagctgctgggcaagaggcaagtgctgcaagaagcactgcaggggctgcaggtagcgctgtgcagccaggccaagctgcaggcccagcaggagttgctgcagaccaagctggagcacctgggccccggcgagcccccgcctgtgctgctcctgcaggatgaccgccactccacgtcgtcctcggagcaggagcgagaggggggaaggacacccacgctggagatccttaagagccacatctcaggaatcttccgccccaagttctcgctccctccaccgctgcagctcattccggaggtgcagaagcccctgcatgagcagctgtggtaccacggggccatcccgagggcagaggtggctgagctgctggtgcactctggggacttcctggtgcgggagagccagggcaagcaggagtacgtgctgtcggtgctgtgggatggtctgccccggcacttcatcatccagtccttggataacctgtaccgactggaaggggaaggctttcctagcattcctttgctcatcgaccacctactgagcacccagcagcccctcaccaagaagagtggtgttgtcctgcacagggctgtgcccaaggacaagtgggtgctgaaccatgaggacctggtgttgggtgagcagattggacgggggaactttggcgaagtgttcagcggacgcctgcgagccgacaacaccctggtggcggtgaagtcttgtcgagagacgctcccacctgacctcaaggccaagtttctacaggaagcgaggatcctgaagcagtacagccaccccaacatcgtgcgtctcattggtgtctgcacccagaagcagcccatctacatcgtcatggagcttgtgcaggggggcgacttcctgaccttcctccgcacggagggggcccgcctgcgggtgaagactctgctgcagatggtgggggatgcagctgctggcatggagtacctggagagcaagtgctgcatccaccgggacctggctgctcggaactgcctggtgacagagaagaatgtcctgaagatcagtgactttgggatgtcccgagaggaagccgatggggtctatgcagcctcagggggcctcagacaagtccccgtgaagtggaccgcacctgaggcccttaactacggccgctactcctccgaaagcgacgtgtggagctttggcatcttgctctgggagaccttcagcctgggggcctccccctatcccaacctcagcaatcagcagacacgggagtttgtggagaaggggggccgtctgccctgcccagagctgtgtcctgatgccgtgttcaggctcatggagcagtgctgggcctatgagcctgggcagcggcccagcttcagcaccatctaccaggagctgcagagcatccgaaagcggcatcggtga

SEQ ID NO: 284 - DNA, 1590 bp, Homo sapiens;
atgggctgtgtgttctgcaagaaattggagccggtggccacggccaaggaggatgctggcctggaaggggacttcagaagctacggggcagcagaccactatgggcctgaccccactaaggcccggcctgcatcctcatttgcccacatccccaactacagcaacttctcctctcaggccatcaaccctggcttccttgatagtggcaccatcaggggtgtgtcagggattggggtgaccctgttcattgccctgtatgactatgaggctcgaactgaggatgacctcaccttcaccaagggcgagaagttccacatcctgaacaatactgaaggtgactggtgggaggctcggtctctcagctccggaaaaactggctgcattcccagcaactacgtggcccctgttgactcaatccaagctgaagagtggtactttggaaagattgggagaaaggatgcagagaggcagctgctttcaccaggcaacccccagggggcctttctcattcgggaaagcgagaccaccaaaggtgcctactccctgtccatccgggactgggatcagaccagaggcgatcatgtgaagcattacaagatccgcaaactggacatgggcggctactacatcaccacacgggttcagttcaactcggtgcaggagctggtgcagcactacatggaggtgaatgacgggctgtgcaacctgctcatcgcgccctgcaccatcatgaagccgcagacgctgggcctggccaaggacgcctgggagatcagccgcagctccatcacgctggagcgccggctgggcaccggctgcttcggggatgtgtggctgggcacgtggaacggcagcactaaggtggcggtgaagacgctgaagccgggcaccatgtccccgaaggccttcctggaggaggcgcaggtcatgaagctgctgcggcacgacaagctggtgcagctgtacgccgtggtgtcggaggagcccatctacatcgtgaccgagttcatgtgtcacggcagcttgctggattttctcaagaacccagagggccaggatttgaggctgccccaattggtggacatggcagcccaggtagctgagggcatggcctacatggaacgcatgaactacattcaccgcgacctgagggcagccaacatcctggttggggagcggctggcgtgcaagatcgcagactttggcttggcgcgtctcatcaaggacgatgagtacaacccctgccaaggttccaagttccccatcaagtggacagccccagaagctgccctctttggcagattcaccatcaagtcagacgtgtggtcctttgggatcctgctcactgagctcatcaccaagggccgaatcccctacccaggcatgaataaacgggaagtgttggaacaggtggagcagggctaccacatgccgtgccctccaggctgcccagcatccctgtacgaggccatggaacagacctggcgtctggacccggaggagaggcctaccttcgagtacctgcagtccttcctggaggactacttcacctccgctgaaccacagtaccagcccggggatcagacatag

SEQ ID NO: 285 - DNA, 1287 bp, Homo sapiens;
atgggcaattgccacacggtggggcccaacgaggcgctggtggtttcagggggctgttgtggttccgactataaacagtacgtgtttggcggctgggcctgggcctggtggtgtatctccgacactcagaggatttccctagagattatgacgttgcagccccgctgcgaggacgtagagacggccgagggggtagctttaactgtgacgggtgtcgcccaggtgaagatcatgacggagaaggaactcctggccgtggcttgtgagcagtttctgggtaagaatgtgcaggacatcaaaaacgtcgtcctgcagaccctggagggacatctgcgctccatcctcgggaccctgacagtggagcagatttatcaggaccgggaccagtttgccaagctggtgcgggaggtggcagcccctgatgttggccgcatgggcattgagatcctcagcttcaccatcaaggacgtgtatgacaaagtggactatctgagctccctgggcaagacgcagactgccgtggtgcagagagatgctgacattggcgtggccgaggctgaacgggacgcaggcatccgggaagctgagtgcaagaaggagatgctggatgtgaagttcatggcagacaccaagattgctgactctaagcgagccttcgagctgcaaaagtcagccttcagtgaggaggttaacatcaagacagctgaggcccagttggcctatgagctgcagggggcccgtgaacagcagaagatccggcaggaagagattgagattgaggttgtgcagcgcaagaaacagattgccgtggaggcacaggagatcctgcgtacggacaaggagctcatcgctacagtgcgccggcctgccgaggccgaggcccaccgcatccagcagattgccgagggtgaaaaggtgaagcaggtcctcttggcacaggcagaggctgagaagatccgcaaaatcggggaggcggaagcggcagtcatcgaggcgatgggcaaggcagaggctgagcggatgaagctcaaggcagaagcctaccagaaatacggggatgcagccaagatggccttggtgctagaggccctgccccagattgctgccaaaatcgctgccccacttaccaaggtcgatgagattgtggtcctcagtggagacaacagtaaggtcacatcagaagtgaaccgactgctggccgagctgcctgcctctgtgcatgccctcacaggcgtggacctgtctaagatacccctgatcaagaaggccactggtgtgcaggtgtga

SEQ ID NO: 286 - DNA, 1854 bp, Homo sapiens;
atgagctggggcaccgagctctgggatcagtttgacaacttagaaaaacacacacagtggggaattgatattcttgagaaatatatcaagtttgtgaaagaaaggacagagattgaactcagctatgcaaagcaactcaggaatctttcaaagaagtaccaacctaaaaagaactcgaaggaggaagaagaatacaagtatacgtcatgtaaagctttcatttccaacctgaacgaaatgaatgattacgcagggcagcatgaagttatctccgagaacatggcatcacagatcattgtggacttggcacgctatgttcaggaactgaaacaggagaggaaatcaaactttcacgatggccgtaaagcacagcagcacatcgagacttgctggaagcagcttgaatctagtaaaaggcgatttgaacgcgattgcaaagaggcggacagggcgcagcagtactttgagaaaatggacgctgacatcaatgtcacaaaagcggatgttgaaaaggcccgacaacaagctcaaatacgtcaccaaatggcagaggacagcaaagcagattactcatccattctccagaaattcaaccatgagcagcatgaatattaccatactcacatccccaacatcttccagaaaatacaagagatggaggaaaggaggattgtgagaatgggagagtccatgaagacatatgcagaggttgatcggcaggtgatcccaatcattgggaagtgcctggatggaatagtaaaagcagccgaatcaattgatcagaaaaatgattcacagctggtaatagaagcttataaatcagggtttgagcctcctggagacattgaatttgaggattacactcagccaatgaagcgcactgtgtcagataacagcctttcaaattccagaggagaaggcaaaccagacctcaaatttggtggcaaatccaaaggaaagttatggccgttcatcaaaaaaaataagcttatgtcccttttaacatccccccatcagcctccccctccccctcctgcctctgcctcaccctctgctgttcccaacggcccccagtctcccaagcagcaaaaggaacccctctcccatcgcttcaacgagttcatgacctccaaacccaaaatccactgcttcaggagcctaaagcgtgggctttctctcaagctgggtgcaacaccggaggatttcagcaacctcccacctgaacaaagaaggaaaaagctgcagcagaaagtcgatgagttaaataaagaaattcagaaggagatggatcaaagagatgccataacaaaaatgaaagatgtctacctaaagaatcctcagatgggagacccagccagtttggatcacaaattagcagaagtcagccaaaatatagagaaactgcgagtagagacccagaaatttgaggcctggctggctgaggttgaaggccggctcccagcacgcagcgagcaggcgcgccggcagagcggactgtacgacagccagaacccacccacagtcaacaactgcgcccaggaccgtgagagcccagatggcagttacacagaggagcagagtcaggagagtgagatgaaggtgctggccacggattttgacgacgagtttgatgatgaggagcccctccctgccatagggacgtgcaaagctctctacacatttgaaggtcagaatgaaggaacgatttccgtagttgaaggagaaacattgtatgtcatagaggaagacaaaggcgatggctggacccgcattcggagaaatgaagatgaagagggttatgtccccacttcatatgtcgaagtctgtttggacaaaaatgccaaagattcctag

SEQ ID NO: 287 - DNA, 1725 bp, Homo sapiens;
atggcttctgacctagagagtagcctcacctccatagactggctcccccagctgaccctccgagctaccattgagaagcttggaagtgcctcccaggctgggcctcccgggagcagccgcaagtgttcaccagggtcacccacagatcctaatgccaccctgagcaaagacgaggcagcagtgcaccaggacggcaagccacgatacagctatgccactctcatcacctatgccatcaactcctctccagccaagaagatgaccctcagcgagatttaccgctggatctgtgataacttcccctattacaagaatgctggcattggttggaagaattcaatacggcacaacctttctctcaacaagtgtttccggaaggtgcccagacctcgggatgaccctgggaagggttcctattggacaattgacacctgccctgacatttcccgaaagagaagacaccctccagatgatgatctgtcccaagactcaccagaacaggaggcaagcaagagcccacggggaggcgttgcagggagtggagaagcctcactgcctcctgaggggaatccgcagatgtcacttcagagccccacatctatagccagctacagccagggcacaggatctgtggatggtggagcagtggcagcaggggcttcaggccgagaaagtgctgagggtccccctcccctctataacaccaaccatgactttaaattctcctactcagagatcaactttcaggatctaagctggtccttccgcaacctctataagtccatgctggagaagtcctcttcctcctctcagcacggcttttcttctctcctgggggacatcccaccctcgaacaactactacatgtatcagcagcagcagccaccgccacctcaacagcagcagcagcagcagcagccgccacagccacctccccagcagtcccagccacagcagcagcaggcacctgcccagggcccctcagctgtagggggtgctcctccactgcacaccccaagcacagatggttgtaccccaccagggggaaagcaagctggggcggaaggctatgggcctccccctgtaatggccatgcatccacccccgctgcagcatggaggctaccaccctcatcagcaccatccccactcccaccctgcccagcagccaccacctccacagccacaggcacaaggccaggctcccatcaacaacactggctttgcctttccttctgactggtgctctaatattgactctttaaaggaaagcttcaagatggtgaatcggctcaattggtccagcattgagcagtcacaattctcagaactgatggagagtctacgacaggcagagcagaagaactggaccctcgaccagcatcacattgccaatctgtgtgactccctcaaccacttccttactcagactggtcacgtgccccctcaagggggtacccaccgcccaccagcccctgcccgtattgctgactcctgtgccctcaccagtggcaaacaggagtcagccatgagccaagtgaactcttatgggcacccacaagctccccacctctaccctggcccatcaccaatgtacccaatccccacccaggactcagcaggatacaatcgcccagcacaccatatggtccctcggccatcagtgccacctcctggtgccaatgaggagatccctgatgacttcgactgggacttgatcacttag

SEQ ID NO: 288 - DNA, 1968 bp, Homo sapiens;
atggccgaggcgcctcaggtggtggagatcgacccggacttcgagccgctgccccggccgcgctcgtgcacctggccgctgcccaggccggagtttagccagtccaactcggccacctccagcccggcgccgtcgggcagcgcggctgccaaccccgacgccgcggcgggcctgccctcggcctcggctgccgctgtcagcgccgacttcatgagcaacctgagcttgctggaggagagcgaggacttcccgcaggcgcccggctccgtggcggcggcggtggcggcggcggccgccgcggccgccaccggggggctgtgcggggacttccagggcccggaggcgggctgcctgcacccagcgccaccgcagcccccgccgcccgggccgctgtcgcagcacccgccggtgccccccgccgccgctgggccgctcgcggggcagccgcgcaagagcagctcgtcccgccgcaacgcgtggggcaacctgtcctacgccgacctcatcaccaaggccatcgagagctcggcggagaagcggctcacgctgtcgcagatctacgagtggatggtcaagagcgtgccctacttcaaggataagggtgacagcaacagctcggcgggctggaagaattcaattcgtcataatctgtccctacacagcaagttcattcgtgtgcagaatgaaggaactggaaaaagttcttggtggatgctcaatccagagggtggcaagagcgggaaatctcctaggagaagagctgcatccatggacaacaacagtaaatttgctaagagccgaagccgagctgccaagaagaaagcatctctccagtctggccaggagggtgctggggacagccctggatcacagttttccaaatggcctgcaagccctggctctcacagcaatgatgactttgataactggagtacatttcgccctcgaactagctcaaatgctagtactattagtgggagactctcacccattatgaccgaacaggatgatcttggagaaggggatgtgcattctatggtgtacccgccatctgccgcaaagatggcctctactttacccagtctgtctgagataagcaatcccgaaaacatggaaaatcttttggataatctcaaccttctctcatcaccaacatcattaactgtttcgacccagtcctcacctggcaccatgatgcagcagacgccgtgctactcgtttgcgccaccaaacaccagtttgaattcacccagcccaaactaccaaaaatatacatatggccaatccagcatgagccctttgccccagatgcctatacaaacacttcaggacaataagtcgagttatggaggtatgagtcagtataactgtgcgcctggactcttgaaggagttgctgacttctgactctcctccccataatgacattatgacaccagttgatcctggggtagcccagcccaacagccgggttctgggccagaacgtcatgatgggccctaattcggtcatgtcaacctatggcagccaggcatctcataacaaaatgatgaatcccagctcccatacccaccctggacatgctcagcagacatctgcagttaacgggcgtcccctgccccacacggtaagcaccatgccccacacctcgggtatgaaccgcctgacccaagtgaagacacctgtacaagtgcctctgccccaccccatgcagatgagtgccctggggggctactcctccgtgagcagctgcaatggctatggcagaatgggccttctccaccaggagaagctcccaagtgacttggatggcatgttcattgagcgcttagactgtgacatggaatccatcattcggaatgacctcatggatggagatacattggattttaactttgacaatgtgttgcccaaccaaagcttcccacacagtgtcaagacaacgacacatagctgggtgtcaggctga

SEQ ID NO: 289 - DNA, 2022 bp, Homo sapiens;
atggcagaggcaccggcttccccggccccgctctctccgctcgaagtggagctggacccggagttcgagccccagagccgtccgcgatcctgtacgtggcccctgcaaaggccggagctccaagcgagccctgccaagccctcgggggagacggccgccgactccatgatccccgaggaggaggacgatgaagacgacgaggacggcgggggacgggccggctcggccatggcgatcggcggcggcggcgggagcggcacgctgggctccgggctgctccttgaggactcggcccgggtgctggcacccggagggcaagaccccgggtctgggccagccaccgcggcgggcgggctgagcgggggtacacaggcgctgctgcagcctcagcaaccgctgccaccgccgcagccgggggcggctgggggctccgggcagccgaggaaatgttcgtcgcggcggaacgcctggggaaacctgtcctacgcggacctgatcacccgcgccatcgagagctccccggacaaacggctcactctgtcccagatctacgagtggatggtgcgttgcgtgccctacttcaaggataagggcgacagcaacagctctgccggctggaagaactccatccggcacaacctgtcactgcatagtcgattcatgcgggtccagaatgagggaactggcaagagctcttggtggatcatcaaccctgatggggggaagagcggaaaagccccccggcggcgggctgtctccatggacaatagcaacaagtataccaagagccgtggccgcgcagccaagaagaaggcagccctgcagacagcccccgaatcagctgacgacagtccctcccagctctccaagtggcctggcagccccacgtcacgcagcagtgatgagctggatgcgtggacggacttccgttcacgcaccaattctaacgccagcacagtcagtggccgcctgtcgcccatcatggcaagcacagagttggatgaagtccaggacgatgatgcgcctctctcgcccatgctctacagcagctcagccagcctgtcaccttcagtaagcaagccgtgcacggtggaactgccacggctgactgatatggcaggcaccatgaatctgaatgatgggctgactgaaaacctcatggacgacctgctggataacatcacgctcccgccatcccagccatcgcccactgggggactcatgcagcggagctctagcttcccgtataccaccaagggctcgggcctgggctccccaaccagctcctttaacagcacggtgttcggaccttcatctctgaactccctacgccagtctcccatgcagaccatccaagagaacaagccagctaccttctcttccatgtcacactatggtaaccagacactccaggacctgctcacttcggactcacttagccacagcgatgtcatgatgacacagtcggaccccttgatgtctcaggccagcaccgctgtgtctgcccagaattcccgccggaacgtgatgcttcgcaatgatccgatgatgtcctttgctgcccagcctaaccagggaagtttggtcaatcagaacttgctccaccaccagcaccaaacccagggcgctcttggtggcagccgtgccttgtcgaattctgtcagcaacatgggcttgagtgagtccagcagccttgggtcagccaaacaccagcagcagtctcctgtcagccagtctatgcaaaccctctcggactctctctcaggctcctccttgtactcaactagtgcaaacctgcccgtcatgggccatgagaagttccccagcgacttggacctggacatgttcaatgggagcttggaatgtgacatggagtccattatccgtagtgaactcatggatgctgatgggttggattttaactttgattccctcatctccacacagaatgttgttggtttgaacgtggggaacttcactggtgctaagcaggcctcatctcagagctgggtgccaggctga

SEQ ID NO: 290 - DNA, 9042 bp, Homo sapiens;
atggccagccagcaggattcgggcttctttgagatcagtatcaaatatttactgaaatcctggagtaatacttctcccgttggcaacggttacatcaagcctccggttccacctgcttctggcacgcacagggagaaagggccgccaaccatgctacccatcaatgtggacccagacagtaaaccaggagaatatgtcctcaaaagtttatttgtcaacttcaccactcaggctgaacgcaagattcgtatcattatggcagagcccctggaaaagccattgacaaaatctctgcaacgtggagaagacccccaatttgatcaggtcatcagctcaatgagctccctttctgagtactgcctgccttccattctacgtacattatttgactggtataaaaggcaaaatggcattgaggatgaatcacatgaatacagaccaagaacaagcaataaatcaaaaagcgatgaacaacagcgagattatttaatggaaagacgggacctcgccattgattttattttttctttagtattaatagaagttttgaaacagattccacttcatcctgtaatagacagtttaatacatgatgttattaacttggctttcaagcactttaaatacaaagaagggtaccttggtcccaacactggcaatatgcatattgtggcagacctgtatgcagaagtcattggagtgttggcacaagccaaattccctgctgtaaagaagaaatttatggcggagctaaaagaattacggcacaaagagcagaacccatatgtggttcaaagcattatcagcttaataatgggcatgaaattctttcgaattaagatgtatccagtggaggattttgaggcctctcttcagtttatgcaggaatgtgcacattacttcctcgaggtcaaagacaaagatatcaagcatgccttggctgggctttttgttgaaatacttgttccagttgctgctgctgttaaaaatgaagtaaatgttccctgccttagaaattttgtggaaagcctgtatgacaccacgctggaactttcttctcgaaagaagcattccttggccttgtaccccctggtgacctgtttgctctgtgtcagtcagaagcagctgttcctgaacaggtggcacattttcctcaacaactgcttgtccaaccttaaaaacaaagatcccaagatggctcgagttgcactggaatctctctacagattactttgggtttacatgattcgaattaaatgtgaaagcaacacagctactcagagccgacttataaccatcatcacaacacttttccccaaagggtcccgcggtgtggtaccaagggacatgcctctgaacatctttgtgaaaatcatccagttcattgcccaggaacgtttagattttgcaatgaaagaaatcattttcgattttctttgtgtgggaaaaccagcaaaagcattcagtctcaacccagagagaatgaacattggtttacgggcattcttggtcatagctgatagcttgcagcagaaagatggggaacctcccatgccggttacaggagccgttcttccttcaggaaacacgttaagagtaaagaaaacatatttgagtaaaacactaactgaagaggaagccaaaatgataggcatgtccttatattactctcaagtacgaaaagctgtagacaacattttaaggcaccttgataaagaagtaggaaggtgtatgatgctgactaatgtacagatgttaaacaaagaaccggaagacatgatcacgggtgagagaaagccaaaaatagatcttttcaggacctgtgttgctgctattcctcgactgcttcctgatgggatgtcaaaacttgaacttattgacttactggctaggctctctattcatatggatgatgaattgcgacatattgcacaaaattctcttcagggtttacttgttgacttctcagattggagggaagatgtactatttggctttaccaacttcctgctccgggaagtaaatgatatgcatcacacactccttgattcgtccctgaagttgctgctgcagctgctcacccagtggaaactagtcatccagacacaaggaaaagtctatgaacaagccaacaaaatcagaaattcagagctcatcgcaaatggctccagtcacagaattcagtcggaacgaggtccccactgcagtgtactccacgctgtagaaggttttgctctggttttactctgcagtttccaggtggccacacgcaaactgtccgttttaatactcaaggaaattcgagcgttgtttattgccctggggcagcctgaggatgacgacaggccgatgattgatgtcatggatcagctaagttcttccattctagaaagttttattcatgtagcagtttcggattcagcaacattaccactcacccacaatgtggatctgcagtggttggtggaatggaacgcagtcctggtcaatagccattatgatgtgaaaagcccttcccatgtctggatatttgcacagtctgtcaaagacccctgggtcctctgcctcttcagcttcctccggcaggagaacttacccaagcactgccccacagccctcagctatgcctggccttatgccttcactcggctccagtcggtgatgcctctggtggacccaaatagcccaattaatgccaagaaaaccagcactgccggcagcggagacaactatgttactttgtggagaaattacctaattctttgttttggagttgcaaaacccagtattatgagcccaggacacttaagagcttccactccagaaataatggcgaccacacctgatggtacagtgagctacgataacaaggccataggcaccccatcggtgggagttctgttaaagcagttggtgcctttgatgagactagagagcattgagatcacagagtccttagttttaggatttggaagaacaaattcccttgttttcagagaattggtagaagaacttcatccattaatgaaagaagctctggaaagaagaccagagaacaagaaacgccgagaacggcgagacttgttaaggctacaactacttcgaatttttgaacttttggctgatgctggtgtaataagtgacagcacaaatggagccctagagcgggatactttagccctgggagctttgttcttagaatatgtggacttgacccgcatgctcctagaagctgaaaatgacaaagaagttgaaattcttaaagatatccgggcacattttagtgcaatggtggccaacttgattcagtgtgttccagttcaccaccgaagatttctcttcccccagcaaagtctgaggcaccaccttttcatcttattcagccagtgggcaggacccttcagcattatgttcactcctctggatcgttacagtgacagaaatcatcagattacaagatatcagtattgtgcattaaaagcaatgtcagcagtactgtgctgtggccctgtctttgacaatgtgggcctttccccagatggctacctatataaatggcttgacaacattctggcttgtcaagatttacgagttcatcaacttggctgcgaagttgttgtcttgctactggaacttaatcctgaccaaataaatctttttaactgggcaattgaccgatgctacacaggttcctaccaacttgcatctggctgcttcaaagccatagcaactgtgtgtggaagcaggaactatcccttcgacatagtgacattgttaaaccttgttctattcaaggcctctgacaccaacagagagatttatgaaatctccatgcagctcatgcagatccttgaagcaaagctttttgtatactcaaagaaagtcgctgagcaaagaccgggaagtattctctatggaacacacggcccgctgccacccctctacagcgtgtcacttgccctcttgtcatgtgagctggccaggatgtaccctgagctcacactccccctcttctcagaggtaagccagcgattccccacaacacaccccaacgggcgccagatcatgcttacctacctgctgccctggctgcacaacatcgagctggtggacagcaggctcctcctcccggggtcgagccccagcagcccagaggacgaagtcaaggaccgggaaggtgacgtgactgcttctcacgggctgagaggaaatggctggggctctccagaagccacgtcactggtcctgaacaacctcatgtacatgacggccaagtatggagatgaagttcctgggccagaaatggaaaatgcttggaatgctttagccaacaatgagaaatggagcaacaacctgaggatcaccttgcagttcctgattagcctctgtggggtcagcagcgacacagttctcctaccctatattaaaaaagtggcaatatacttgtgccgtaacaacaccattcaaaccatggaagagcttctctttgagctgcagcagacagagcccgtgaaccccatcgtccagcattgtgacaacccgcccttctaccgcttcacggccagtagcaaggcttccgcagcagcctcaggaaccacctctagcagcaatacagtggttgctggccaggaaaatttcccagatgctgaggagaacaagatattgaaagaatctgatgaaaggtttagtaatgtcatcagagcccacactcgcctcgagtcaagatacagcaatagctctggaggatcctacgatgaagataaaaatgatccaatttctccctacacgggctggttgctgactattacagagaccaagcagccgcagcccttaccgatgccttgtactggaggatgctgggcccccctggttgactatctcccggagaccatcactccccgggggccactccacaggtgcaatattgctgtaatttttatgactgaaatggtggtggatcacagtgtacgagaagactgggcgcttcatctaccattattacttcatgctgtcttcttaggtttagaccactaccggcctgaagtctttgaacacagcaaaaaactgcttcttcacctcttgattgccctctcttgcaacagcaatttccattccattgcttccgtgctcctgcagacccgagagatgggtgaagctaagactctaaccgtgcagccagcctaccaacctgaatatctctatacaggtggctttgacttcctgagagaggaccagtcatccccggtgcctgactcagggcttagttcaagctccacctcctctagcatcagtctgggaggcagcagtggaaacctcccacagatgacccaggaggtagaagatgtggacacagctgctgaaacagatgagaaggcaaacaagctcattgagtttctcacgaccagggcatttggtccactttggtgccatgaagacatcacacctaaaaatcaaaattcaaagagtgctgaacagctcactaattttctacgtcacgttgtatctgtatttaaagattccaaatcaggcttccatctggagcaccagttgagtgaagttgcattgcagacagccctcgcaagctcttcaaggcactatgctggtcggtccttccagatattccgggccctcaagcaacctctgtcagcacatgccttatctgaccttctctcaagattggtggaggtgataggagaacatggagatgagattcagggttatgtaatggaagcgctcctaaccttggaggcggctgtggataacttgtctgactgcttgaagaacagtgacctcctaactgtattgtcccgctcttcctcaccagatttaagctccagcagtaaactaacagcaagcagaaagagcacaggacaactaaacatgaacccgggaaccaccagcggcaacaccgcaactgccgaacggagccggcatcaacgaagcttctctgtgcccaagaagtttggtgtcatcgaccgatcctctgacccacctcgaagtgccacactggacagaattcaggcttgtacccaacaaggcctctcctcaaaaaccagaagctcatcctccttgaaggacagtctcacggacccatcccacataaaccatcccaccaacctgctggccaccatattctgggtcacagtggccttgatggagtctgattttgagtttgaatacttaatggccttaaggctgttgagcagactactggcacatatgccactcgataaggctgagaaccgagaaaagcttgagaaactccaggcacagctgaagtgggccgacttctccgggctgcagcagctgctgctgaaaggattcacatccctcaccaccacagacctgaccctgcagctcttcagtctgctgacaccagtgtccaaaatatccatggtggatgcatcccacgctattgggtttccactgaatgtcttgtgtctcctgcctcagctgattcagcattttgaaaatcccaatcagttctgtaaggatatagccgaaaggattgctcaggtttgtttagaagagaagaaccccaaactttcaaatcttgcacatgtcatgactctttataaaacgcacagctacacgagggactgtgccacgtgggtcaatgtggtctgtcgataccttcatgaagcatatgctgacattaccttgaatatggttacctacctggcagagctgctggagaagggcctccctagtgtgcagcagcccctgctccaggtgatctacagtcttctcagctacatggacctttctgtcgttcctgtcaaacagttcaatgtggaagttctgaagacaattgaaaaatatgtgcaaagtgttcactggagagaagctctgaatatcttgaagctggtagtttctcggtcagccagccttgttttaccttcataccagcacagtgacctctcaaaaatagaaatacatcgagtgtggactagtgcttccaaggaattacctgggaaaaccctggacttccacttcgatatttcggagactccaatcatcgggaggcggtatgatgagctgcagaattcttctgggcgtgatgggaagcccagggccatggccgtcacccggagcacatcttccacttcctcaggctccaactccaacgtccttgttccagtgagctggaaaaggccccagtattctcagaagagaacaaaagagaagttggtacatgtcctttctctgtgtggccaagaagtaggattgagcaaaaatccatcagtgattttttcatcgtgtggggatctggatctgcttgagcaccagacaagcttggtatcttctgaggacggtgcccgagagcaggagaacatggatgacacaaacagcgagcagcagtttagagtcttcagagacttcgacttcctagatgtggagctggaggatggagagggtgagagtatggacaatttcaactggggagtgcgcagacgttctctggacagcctggataagtgtgatatgcagattctggaggagcgccaactgtcaggaagcactcctagcctgaataaaatgcaccatgaggactccgatgaatcatccgaggaggaggacctcacagccagccagatcctggagcactcagacctaatcatgactctctccccctctgaagagacgaatcccatggagctgctcaccacagcctgtgactcgacccctgcagaacctcattcctttaacaccagaatgtccagctttgatgcttccttgcctgatatgaataatctgcagatttctgagggttcaaaggctgaagctgttcgtgaggaggaggacaccaccgtgcatgaggatgatctttctagttccatcaatgaactcccagcagcttttgaatgcagcgacagctttagcctggacatgactgagggggaagaaaaaggcaatcgggcactggaccagtttaccctggcgagctttggagaaggtgacaggggagtctctccccctccctcgcccttcttctcagccatccttgccgcctttcagcccgcagcctgtgacgatgccgaggaggcctggcgcagccacatcaaccagcttatgtgtgactcagatggctcctgtgctgtgtatacatttcatgtgttctcctccttgtttaagaatattcagaaaaggttctgcttcctaacctgtgatgcagccagttaccttggagataacctccggggaatcggatccaaatttgtcagctcttcccagatgctcacctcctgctctgaatgtcctacactttttgtggatgccgagactctcctttcatgtggacttctggacaagctcaagttcagtgtgttagaactgcaagaatatttggatacctacaacaacaggaaagaggccacactctcttggcttgcaaattgtaaggcaacatttgcagggggatcaagagatggagtaattacctgtcaaccaggggactccgaagaaaagcaattggaactgtgtcagagattatataagctacacttccagctgctattgctttttcagtcctactgtaagctcatcggccaggtgcacgaagttagctccatgccagagctgctgaatatgtccagggaactgagtgacctaaagaaacacctgaaggaagccagtgcagtcattgcagctgaccctctctattcagacggcgcgtggtccgagcccaccttcacgtccactgaagcagccatccagtccatgctggagtgcctgaagaacaacgaactcggcaaagctttgcggcagatcagggagtgcagaagtctgtggcccaatgacatctttggaagcagttctgatgatgaggtccagacactactgaatatttatttccgtcaccaaactctgggacagacgggtacttatgccctggtggggtctaaccagagcctgaccgagatctgcaccaagctgatggagctgaacatggagatccgggacatgatccgcagggcccagagttaccgagtcctcactacttttcttccagactccagtgtttctggcactagtctctga

SEQ ID NO: 291 - DNA, 2490 bp, Homo sapiens;
atggcgaaatataacacggggggcaacccgacagaggatgtctcagtcaatagccgacccttcagagtcacagggccaaactcatcttcaggaatacaagcaagaaagaacttattcaacaaccaaggaaatgccagccctcctgcaggacccagcaatgtacctaagtttgggtccccaaagccacctgtggcagtcaaaccttcttctgaggaaaagcctgacaaggaacccaagcccccgtttctaaagcccactggagcaggccaaagattcggaacaccagccagcttgaccaccagagaccccgaggcgaaagtgggatttctgaaacctgtaggccccaagcccatcaacttgcccaaagaagattccaaacctacatttccctggcctcctggaaacaagccatctcttcacagtgtaaaccaagaccatgacttaaagccactaggcccgaaatctgggcctactcctccaacctcagaaaatgaacagaagcaagcgtttcccaaattgactggggttaaagggaaatttatgtcagcatcacaagatcttgaacccaagcccctcttccccaaacccgcctttggccagaagccgcccctaagtaccgagaactcccatgaagacgaaagccccatgaagaatgtgtcttcatcaaaagggtccccagctcccctgggagtcaggtccaaaagcggccctttaaaaccagcaagggaagactcagaaaataaagaccatgcaggggagatttcaagtttgccctttcctggagtggttttgaaacctgctgcgagcaggggaggcccaggtctctccaaaaatggtgaagaaaaaaaggaagataggaagatagatgctgctaagaacaccttccagagcaaaataaatcaggaagagttggcctcagggactcctcctgccaggttccctaaggccccttctaagctgacagtgggggggccatggggccaaagtcaggaaaaggaaaagggagacaagaattcagccaccccgaaacagaagccattgcctcccttgtttaccttgggtccacctccaccaaaacccaacagaccaccaaatgttgacctgacgaaattccacaaaacctcttctggaaacagtactagcaaaggccagacgtcttactcaacaacttccctgccaccacctccaccatcccatccggccagccaaccaccattgccagcatctcacccatcacaaccaccagtcccaagcctacctcccagaaacattaaacctccgtttgacctaaaaagccctgtcaatgaagacaatcaagatggtgtcacgcactctgatggtgctggaaatctagatgaggaacaagacagtgaaggagaaacatatgaagacatagaagcatccaaagaaagagagaagaaaagggaaaaggaagaaaagaagaggttagagctggagaaaaaggaacagaaagagaaagaaaagaaagaacaagaaataaagaagaaatttaaactaacaggccctattcaagtcatccatcttgcaaaagcttgttgtgatgtcaaaggaggaaagaatgaactgagcttcaagcaaggagagcaaattgaaatcatccgcatcacagacaacccagaaggaaaatggttgggcagaacagcaaggggttcatatggctatattaaaacaactgctgtagagattgactatgattctttgaaactgaaaaaagactctcttggtgccccttcaagacctattgaagatgaccaagaagtatatgatgatgttgcagagcaggatgatattagcagccacagtcagagtggaagtggagggatattccctccaccaccagatgatgacatttatgatgggattgaagaggaagatgctgatgatggctccacactacaggttcaagagaagagtaatacgtggtcctgggggattttgaagatgttaaagggaaaagatgacagaaagaaaagtatacgagagaaacctaaagtctctgactcagacaataatgaaggttcatctttccctgctcctcctaaacaattggacatgggagatgaagtttacgatgatgtggatacctctgatttccctgtttcatcagcagagatgagtcaaggaactaatgttggaaaagctaagacagaagaaaaggaccttaagaagctaaaaaagcaggaaaaagaagaaaaagacttcaggaaaaaatttaaatatgatggtgaaattagagtcctatattcaactaaagttacaacttccataacttctaaaaagtggggaaccagagatctacaggtaaaacctggtgaatctctagaagttatacaaaccacagatgacacaaaagttctctgcagaaatgaagaagggaaatatggttatgtccttcggagttacctagcggacaatgatggagagatctatgatgatattgctgatggctgcatctatgacaatgactag

SEQ ID NO: 292 - DNA, 354 bp, Homo sapiens;
atgaagttcgtgtacaaagaagagcatccgttcgagaagcgccgctctgagggcgagaagatccgaaagaaatacccggaccgggtgccggtgatagtagaaaaggctcccaaagctcggataggagacctggacaaaaagaaatacctggtgccttctgatctcacagttggtcagttctacttcttgatccggaagcgaattcatctccgagctgaggatgccttgtttttctttgtcaacaatgtcattccacccaccagtgccacaatgggtcagctgtaccaggaacaccatgaagaagacttctttctctacattgcctacagtgacgaaagtgtctacggtctgtga

SEQ ID NO: 293 - DNA, 5055 bp, Homo sapiens;; identical to SEQ ID NO: 25

SEQ ID NO: 294 - DNA, 2913 bp, Homo sapiens;
atggacgcagcagagccgggactccccccaggtcctgagggcaggaagaggtacagtgacatcttccggagcctggacaacctcgaaatctcactggggaacgtgacccttgagatgctggctggagaccctctactctcagaagacccagaacctgacaagacccctacagccactgttaccaacgaagccagctgttggagcggcccctccccagagggtcctgtacccctcacaggggaggaactggacttgcggctcattcggacaaaggggggtgtggacgcagccctggaatatgccaagacctggagccgctatgccaaggaactgcttgcctggactgaaaagagagccagctatgagctggagtttgctaagagcaccatgaagatcgctgaagctggcaaggtgtccattcaacagcagagccacatgcctctgcagtacatctacaccctgtttctggagcacgatctcagcctgggaaccctggccatggagacagtggcccagcagaaaagagactactaccagcccctcgccgccaaacggactgagattgagaagtggcggaaggagttcaaggagcagtggatgaaggagcagaagcggatgaatgaggcggtgcaggcactgcggcgcgcccagctgcagtatgtgcaacgcagcgaggacctgcgggcacgctcccaggggtcccctgaggactcggccccccaggcctcgccgggacctagcaagcagcaggagcggcggcggcgctcgcgagaggaggcccaggccaaggcgcaggaggccgaggcgctgtaccaggcctgtgtccgcgaggccaacgcgcggcagcaggacctggagatcgccaagcagcgaatcgtgtcgcacgtgcgcaagctggtgtttcagggggatgaagtgctgaggcgggtgacgctgagtctcttcgggctgcggggggcgcaggcagagcgtggcccccgcgccttcgccgccctggccgagtgctgtgcgccctttgagccgggccagcgctaccaggagtttgtacgggcgctgcggcccgaggccccgccgcccccgccgcccgccttctccttccaggagttccttccctccttgaacagctcccctctggacatcagaaagaagctctctgggcctcttcctccaaggctggatgagaattcagctgagccaggcccttgggaggatccgggcacaggctggcgctggcaagggactccaggccccactccgggcagcgatgtggacagcgtgggtggcggcagcgagtctcggtccctggactcacccacttccagcccaggcgctggcacgaggcagctggtgaaggcttcgtccacaggcactgagtcctcagatgactttgaggagcgagaccctgacctgggagacgggctggagaatgggctgggcagccccttcgggaagtggacactgtccagcgcggctcagacccaccagctgcggcgactgcggggcccagccaagtgccgcgagtgcgaagccttcatggtcagcgggacggagtgtgaggagtgctttctgacctgccacaagcgctgcctggagactctcctgatcctctgtggacacaggcggctcccagcccggacacccctttttggggttgacttcctgcagctacccagggacttcccggaggaggtaccctttgtggtcacgaagtgcacggctgagatagaacaccgtgccctggatgtgcagggcatttaccgggtcagcgggtcccgggtccgtgtggagcggctgtgccaggctttcgagaatggccgagcgttggtggagctgtcggggaactcgcctcatgacgtctcgagtgtcctcaagcgatttcttcaggagctcaccgagcccgtgatccccttccacctctacgacgccttcatctctctggctaagaccttgcatgcagaccctggggacgaccctgggacccccagccccagccctgaggttatccgctcgctgaagaccctcttggtacagctgcctgactctaactacaacaccctgcggcacctggtggcccatctgttcagggtggctgcacgatttatggaaaacaagatgtctgccaacaacctgggcattgtgtttgggccgacactgctgcggccgccggacggcccgcgggcagccagcgccatccctgtcacctgcctgctggactctgggcatcaggcccagcttgtggagttcctcatcgtgcactacgagcagatctttgggatggatgagctcccccaggccactgagcccccgccccaagactccagcccagcccctgggcccctcacaaccagctcccaaccgccacccccgcaccttgacccagactcccagcccccagtcctagcctcagaccccggcccagacccccagcaccacagtaccctggagcagcatcccacggccacacctaccgagattccaactccacagagtgaccagagagaggacgtggctgaagacaccaaagatgggggaggggaagtgtccagccaaggcccagaggactcactcctggggacacagtctcgtggccacttcagccgccagccagtgaagtatccccggggcggtgtgaggcctgtaacccaccagctgtccagtctggccctggtggcttccaagctgtgcgaggagacccccatcacatcagtgcccagagggagtttgcgggggcgggggcccagccctgcagctgcctcccctgagggcagccccctgcgccgcaccccgctgcccaagcattttgagattacccaggagacagcccggctactctcgaaattggacagcgaggctgtgcccagggccacctgctgcccggacgtccagcctgaggaagccgaggaccatctctga

SEQ ID NO: 295 - DNA, 1146 bp, Homo sapiens;
atgtccggggtggtgcggaccctcagccgctgcctgctgccggccgaggccggcggggcccgcgagcgcagggcgggcagcggcgcgcgcgacgcggagcgcgaggcccggaggcgtagccgcgacatcgacgcgctgctggcccgcgagcggcgcgcggtccggcgcctggtgaagatcctgctgctgggcgcgggcgagagcggcaagtccacgttcctcaagcagatgcgcatcatccacggccgcgagttcgaccagaaggcgctgctggagttccgcgacaccatcttcgacaacatcctcaagggctcaagggttcttgttgatgcacgagataagcttggcattccttggcagtattctgaaaatgagaagcatgggatgttcctgatggccttcgagaacaaggcggggctgcctgtggagccggccaccttccagctgtacgtcccggccctgagcgcactctggagggattctggcatcagggaggctttcagccggagaagcgagtttcagctgggggagtcggtgaagtacttcctggacaacttggaccggatcggccagctgaattactttcctagtaagcaagatatcctgctggctaggaaagccaccaagggaattgtggagcatgacttcgttattaagaagatcccctttaagatggtggatgtgggcggccagcggtcccagcgccagaagtggttccagtgcttcgacgggatcacgtccatcctgttcatggtctcctccagcgagtacgaccaggtcctcatggaggacaggcgcaccaaccggctggtggagtccatgaacatcttcgagaccatcgtcaacaacaagctcttcttcaacgtctccatcattctcttcctcaacaagatggacctcctggtggagaaggtgaagaccgtgagcatcaagaagcacttcccggacttcaggggcgacccgcacaggctggaggacgtccagcgctacctggtccagtgcttcgacaggaagagacggaaccgcagcaagccactcttccaccacttcaccaccgccatcgacaccgagaacgtccgcttcgtgttccatgctgtgaaagacaccatcctgcaggagaacctgaaggacatcatgctgcagtga

SEQ ID NO: 296 - DNA, 1080 bp, Homo sapiens;
atgactctggagtccatcatggcgtgctgcctgagcgaggaggccaaggaagcccggcggatcaacgacgagatcgagcggcagctccgcagggacaagcgggacgcccgccgggagctcaagctgctgctgctcgggacaggagagagtggcaagagtacgtttatcaagcagatgagaatcatccatgggtcaggatactctgatgaagataaaaggggcttcaccaagctggtgtatcagaacatcttcacggccatgcaggccatgatcagagccatggacacactcaagatcccatacaagtatgagcacaataaggctcatgcacaattagttcgagaagttgatgtggagaaggtgtctgcttttgagaatccatatgtagatgcaataaagagtttatggaatgatcctggaatccaggaatgctatgatagacgacgagaatatcaattatctgactctaccaaatactatcttaatgacttggaccgcgtagctgaccctgcctacctgcctacgcaacaagatgtgcttagagttcgagtccccaccacagggatcatcgaatacccctttgacttacaaagtgtcattttcagaatggtcgatgtagggggccaaaggtcagagagaagaaaatggatacactgctttgaaaatgtcacctctatcatgtttctagtagcgcttagtgaatatgatcaagttctcgtggagtcagacaatgagaaccgaatggaggaaagcaaggctctctttagaacaattatcacatacccctggttccagaactcctcggttattctgttcttaaacaagaaagatcttctagaggagaaaatcatgtattcccatctagtcgactacttcccagaatatgatggaccccagagagatgcccaggcagcccgagaattcattctgaagatgttcgtggacctgaacccagacagtgacaaaattatctactcccacttcacgtgcgccacagacaccgagaatatccgctttgtctttgctgccgtcaaggacaccatcctccagttgaacctgaaggagtacaatctggtctaa

SEQ ID NO: 297 - DNA, 414 bp, Homo sapiens;
atgaggccgcagcaggcgccggtgtccggaaaggtgttcattcagcgagactacagcagtggcacacgctgccagttccagaccaagttccctgcggagctggagaaccggattgataggcagcagtttgaagaaacagttcgaactctaaataacctttatgcagaagcagagaagctcggcggccagtcatatctcgaaggttgtttggcttgtttaacagcatataccatcttcctatgcatggaaactcattatgagaaggttctgaagaaagtctccaaatacattcaagagcagaatgagaagatctatgctccacaaggcctcctcctgacagaccctattgagcgaggactgcgagttattgaaattaccatttatgaagacagaggcatgagcagtggaagataa

SEQ ID NO: 298 - DNA, 1425 bp, Homo sapiens;
atggcgcagcatgattttgttcctgcttggctaaatttctcaacaccacagtcagctaagtcacctactgccaccttcgaaaaacacggagagcacctacccagaggagaaggtagatttggagtaagccgccgtcgacataattcctctgatggtttttttaacaatggtcccctacgaactgcaggagattcttggcaccagccctccctgttccgccatgattctgtggactctggtgtctctaagggagcatatgctggaatcacagggaacccatctggttggcatagctcttcccgaggtcatgatggcatgagccaacgtagtggaggtggcacagggaaccatcgccattggaatggcagcttccactcccggaaagggtgtgcttttcaggaaaagccacctatggagattagggaagaaaagaaagaagacaaggtggaaaagttgcagtttgaagaggaggactttccttccttgaatccagaagctggcaaacagcatcagccatgcagacctattgggacaccttctggagtatgggaaaacccgcctagtgccaagcaaccctccaagatgctagttatcaaaaaagtttccaaagaggatcctgctgctgccttctctgctgcattcacctcaccaggatctcaccatgcaaatgggaacaaattgtcatccgtggttccaagtgtctataagaacctggttcctaagcctgtaccacctccttccaagcctaatgcatggaaagctaacaggatggagcacaagtcaggatccctttcctctagccgggagtctgcttttaccagtccaatctctgttaccaaaccagtggtactggctagtggtgcagctctgagttctcccaaagagagtccctccagcaccacccctccaattgagatcagctcctctcgtctgaccaagttgacccgccgaaccaccgacaggaagagtgagttcctgaaaactctgaaggatgaccggaatggagacttctcagagaatagagactgtgacaagctggaagatttggaggacaacagcacacctgaaccaaaggaaaatggggaggaaggctgtcatcaaaatggtcttgccctccctgtagtggaagaaggggaggttctctcacactctctagaagcagagcacaggttattgaaagctatgggttggcaggaatatcctgaaaatgatgagaattgccttcccctcacagaggatgagctcaaagagttccacatgaagacagagcagctgagaagaaatggctttggaaagaatggcttcttgcagagccgcagttccagtctgttctccccttggagaagcacttgcaaagcagagtttgaggactcagacaccgaaaccagtagcagtgaaacatcagatgacgatgcctggaagtag

SEQ ID NO: 299 - DNA, 1650 bp, Homo sapiens;
atggcgacgcccaggggcctgggggccctgctcctgctcctcctgctcccgacctcaggtcaggaaaagcccaccgaagggccaagaaacacctgcctggggagcaacaacatgtacgacatcttcaacttgaatgacaaggctttgtgcttcaccaagtgcaggcagtcgggcagcgactcctgcaatgtggaaaacttgcagagatactggctaaactacgaggcccatctgatgaaggaaggtttgacgcagaaggtgaacacgcctttcctgaaggctttggtccagaacctcagcaccaacactgcagaagacttctatttctctctggagccctctcaggttccgaggcaggtgatgaaggacgaggacaagccccctgacagagtgcgacttcccaagagcctttttcgatccctgccaggcaacaggtctgtggtccgcttggccgtcaccattctggacattggtccagggactctcttcaagggcccccggctcggcctgggagatggcagcggcgtgttgaacaatcgcctggtgggtttgagtgtgggacaaatgcatgtcaccaagctggctgagcctctggagatcgtcttctctcaccagcgaccgccccctaacatgaccctcacctgtgtattctgggatgtgactaaagggaccactggagactggtcttctgagggctgctccacggaggtcagacctgaggggaccgtgtgctgctgtgaccacctgacctttttcgccctgctcctgagacccaccttggaccagtccacggtgcatatcctcacacgcatctcccaggcgggctgtggggtctccatgatcttcctggccttcaccattattctttatgcctttctgaggctttcccgggagaggttcaagtcagaagatgccccaaagatccacgtggccctgggtggcagcctgttcctcctgaatctggccttcttggtcaatgtggggagtggctcaaaggggtctgatgctgcctgctgggcccggggggctgtcttccactacttcctgctctgtgccttcacctggatgggccttgaagccttccacctctacctgctcgctgtcagggtcttcaacacctacttcgggcactacttcctgaagctgagcctggtgggctggggcctgcccgccctgatggtcatcggcactgggagtgccaacagctacggcctctacaccatccgtgatagggagaaccgcacctctctggagctatgctggttccgtgaagggacaaccatgtacgccctctatatcaccgtccacggctacttcctcatcaccttcctctttggcatggtggtcctggccctggtggtctggaagatcttcaccctgtcccgtgctacagcggtcaaggagcgggggaagaaccggaagaaggtgctcaccctgctgggcctctcgagcctggtgggtgtgacatgggggttggccatcttcaccccgttgggcctctccaccgtctacatctttgcacttttcaactccttgcaaggtgtcttcatctgctgctggttcaccatcctttacctcccaagtcagagcaccacagtctcctcctctactgcaagattggaccaggcccactccgcatctcaagaatag

SEQ ID NO: 300 - DNA, 984 bp, Homo sapiens;
atgcccgcactcctggagcgccccaagctttccaacgccatggccagggcgctgcaccggcacattatgatggagcgggagcgcaagcggcaggaggaagaagaggtggataagatgatggaacagaagatgaaggaagaacaggagagaaggaagaaaaaggagatggaagagagaatgtcattagaggagaccaaggaacaaattctgaagttggaggagaagcttttggctctacaggaagagaagcaccagcttttcctgcagctcaagaaagttttacatgaggaagaaaaacggaggcgaaaggaacagagtgacctgaccaccctaacatcagctgcataccagcagagcctgactgttcacacaggaactcatctcctcagcatgcaggggagccctggaggacacaatcgcccaggcaccctcatggcagctgacagagccaaacaaatgtttggaccccaagtgcttacgacccggcactacgtgggctcagcagctgcttttgcagggacaccagagcatggacaattccaaggcagtcctggtggtgcctatgggactgctcagcccccacctcactatgggcccacacagccagcttatagtcctagtcagcagctcagagctccttcggcattccctgcagtgcagtacctatctcagccacagccacagccctatgctgtgcatggccactttcagcccactcagacaggtttcctccagcctggtggtgccctgtccttgcaaaagcagatggaacatgctaaccagcagactggcttctccgactcatcctctctgcgccccatgcacccccaggctctgcatccagcccctggactccttgcttccccccagctccctgtgcagatgcagccagcaggaaagtcgggctttgcagctaccagccaacctggccctcggctccccttcatccaacacagccagaacccgcgattctaccacaagtga

SEQ ID NO: 301 - DNA, 483 bp, Homo sapiens;
atggaggctgagagaccccaggaagaagaggatggtgagcagggcccccctcaggatgaggaaggctggccccctccaaactccaccactcggccttggcgatctgctcctccatcccctcctcctccagggacccgccacacagccctgggaccccgctcggcctccctgctctccctgcagactgaactccttctggacctggtggctgaagcccagtcccgccgcctggaggagcagagggccaccttctacaccccccaaaacccctcaagcctagcccctgccccactccgtcctctcgaggacagagaacagctttacagcactatcctcagtcaccagtgccagcggatggaagcccagcggtcagagcctcccctccctccaggggggcaagagctcctggagttgctgctgagagttcagggtgggggtcgaatggaggagcaaaggtcccggccccccacacacacctgctga

SEQ ID NO: 302 - DNA, 654 bp, Homo sapiens;
atggaagccatcgccaaatatgacttcaaagctactgcagacgacgagctgagcttcaaaaggggggacatcctcaaggttttgaacgaagaatgtgatcagaactggtacaaggcagagcttaatggaaaagacggcttcattcccaagaactacatagaaatgaaaccacatccgtggttttttggcaaaatccccagagccaaggcagaagaaatgcttagcaaacagcggcacgatggggcctttcttatccgagagagtgagagcgctcctggggacttctccctctctgtcaagtttggaaacgatgtgcagcacttcaaggtgctccgagatggagccgggaagtacttcctctgggtggtgaagttcaattctttgaatgagctggtggattatcacagatctacatctgtctccagaaaccagcagatattcctgcgggacatagaacaggtgccacagcagccgacatacgtccaggccctctttgactttgatccccaggaggatggagagctgggcttccgccggggagattttatccatgtcatggataactcagaccccaactggtggaaaggagcttgccacgggcagaccggcatgtttccccgcaattatgtcacccccgtgaaccggaacgtctaa

SEQ ID NO: 303 - DNA, 1302 bp, Homo sapiens;
atgtcagggcggcccagaaccacctcctttgcggagagctgcaagccggtgcagcagccttcagcttttggcagcatgaaagttagcagagacaaggacggcagcaaggtgacaacagtggtggcaactcctgggcagggtccagacaggccacaagaagtcagctatacagacactaaagtgattggaaatggatcatttggtgtggtatatcaagccaaactttgtgattcaggagaactggtcgccatcaagaaagtattgcaggacaagagatttaagaatcgagagctccagatcatgagaaagctagatcactgtaacatagtccgattgcgttatttcttctactccagtggtgagaagaaagatgaggtctatcttaatctggtgctggactatgttccggaaacagtatacagagttgccagacactatagtcgagccaaacagacgctccctgtgatttatgtcaagttgtatatgtatcagctgttccgaagtttagcctatatccattcctttggaatctgccatcgggatattaaaccgcagaacctcttgttggatcctgatactgctgtattaaaactctgtgactttggaagtgcaaagcagctggtccgaggagaacccaatgtttcgtatatctgttctcggtactatagggcaccagagttgatctttggagccactgattatacctctagtatagatgtatggtctgctggctgtgtgttggctgagctgttactaggacaaccaatatttccaggggatagtggtgtggatcagttggtagaaataatcaaggtcctgggaactccaacaagggagcaaatcagagaaatgaacccaaactacacagaatttaaattccctcaaattaaggcacatccttggactaaggattcgtcaggaacaggacatttcacctcaggagtgcgggtcttccgaccccgaactccaccggaggcaattgcactgtgtagccgtctgctggagtatacaccaactgcccgactaacaccactggaagcttgtgcacattcattttttgatgaattacgggacccaaatgtcaaactaccaaatgggcgagacacacctgcactcttcaacttcaccactcaagaactgtcaagtaatccacctctggctaccatccttattcctcctcatgctcggattcaagcagctgcttcaacccccacaaatgccacagcagcgtcagatgctaatactggagaccgtggacagaccaataatgctgcttctgcatcagcttccaactccacctga

SEQ ID NO: 304 - DNA, 387 bp, Homo sapiens;
atgtggtcgacgagaagccccaacagcacggcgtggcctctcagcctcgagcctgatccggggatggcctctgcctccaccacaatgcatactaccaccattgcagagcctgatccagggatgtctggatggccggatggcagaatggagacctccacccccaccataatggacattgtcgtcattgcaggtgtgattgctgctgtggccatcgtcctagtctccctcctcttcgtcatgctgcgctacatgtaccggcacaagggcacgtaccacaccaatgaggccaagggcacggagtttgctgagagtgcagatgcagccctgcagggagaccctgccctccaagatgctggtgatagcagcagaaaggagtactttatttga

SEQ ID NO: 305 - DNA, 1974 bp, Homo sapiens;; identical to SEQ ID NO: 27

SEQ ID NO: 306 - DNA, 1581 bp, Homo sapiens;
ctgggggggcgctcaagctgcgaggatccgggctgcccgcgagacgaggagcgggcgcccaggatggggtgcatgaagtccaagttcctccaggtcggaggcaatacattctcaaaaactgaaaccagcgccagcccacactgtcctgtgtacgtgccggatcccacatccaccatcaagccggggcctaatagccacaacagcaacacaccaggaatcagggaggcaggctctgaggacatcatcgtggttgccctgtatgattacgaggccattcaccacgaagacctcagcttccagaagggggaccagatggtggtcctagaggaatccggggagtggtggaaggctcgatccctggccacccggaaggagggctacatcccaagcaactatgtcgcccgcgttgactctctggagacagaggagtggtttttcaagggcatcagccggaaggacgcagagcgccaactgctggctcccggcaacatgctgggctccttcatgatccgggatagcgagaccactaaaggaagctactctttgtccgtgcgagactacgaccctcggcagggagataccgtgaaacattacaagatccggaccctggacaacgggggcttctacatatccccccgaagcaccttcagcactctgcaggagctggtggaccactacaagaaggggaacgacgggctctgccagaaactgtcggtgccctgcatgtcttccaagccccagaagccttgggagaaagatgcctgggagatccctcgggaatccctcaagctggagaagaaacttggagctgggcagtttggggaagtctggatggccacctacaacaagcacaccaaggtggcagtgaagacgatgaagccagggagcatgtcggtggaggccttcctggcagaggccaacgtgatgaaaactctgcagcatgacaagctggtcaaacttcatgcggtggtcaccaaggagcccatctacatcatcacggagttcatggccaaaggaagcttgctggactttctgaaaagtgatgagggcagcaagcagccattgccaaaactcattgacttctcagcccagattgcagaaggcatggccttcatcgagcagaggaactacatccaccgagacctccgagctgccaacatcttggtctctgcatccctggtgtgtaagattgctgactttggcctggcccgggtcattgaggacaacgagtacacggctcgggaaggggccaagttccccatcaagtggacagctcctgaagccatcaactttggctccttcaccatcaagtcagacgtctggtcctttggtatcctgctgatggagatcgtcacctacggccggatcccttacccagggatgtcaaaccctgaagtgatccgagctctggagcgtggataccggatgcctcgcccagagaactgcccagaggagctctacaacatcatgatgcgctgctggaaaaaccgtccggaggagcggccgaccttcgaatacatccagagtgtgctggatgacttctacacggccacagagagccagtaccaacagcagccatga

SEQ ID NO: 307 - DNA, 3075 bp, Homo sapiens;
atggagcggaggtcgcggaggaagtcgcggcgcaacgggcgctcgaccgcgggcaaggccgccgcgacccagcccgcgaagtctccgggcgcacagctctggctctttcccagcgccgcgggcctccaccgcgcgctgctccggagggtggaggtgacgcgccaactctgctgctcgccggggcgcctcgcggtcttggaacgcggcggggcgggcgtccaggttcaccagctgctcgccgggagcggcggcgcccggacgccgaaatgcattaaattaggaaaaaacatgaagatacattccgtggaccaaggagcagagcacatgctgattctctcatcagatggaaaaccatttgagtatgacaactatagcatgaaacatctaaggtttgaaagcattttacaagaaaaaaaaataattcagatcacatgtggagattaccattctcttgcactctcaaaaggtggtgagctttttgcctggggacagaacctgcatgggcagcttggagttggaaggaaatttccctcaaccaccacaccacagattgtggagcacctcgcaggagtacccttggctcagatttctgccggagaagcccacagcatggccttatccatgtctggcaacatttattcatggggaaaaaatgaatgtggacaactaggcctgggccacactgagagtaaagatgatccatcccttattgaaggactagacaatcagaaagttgaatttgtcgcttgtggtggctctcacagtgccctactcacacaggatgggctgctgtttactttcggtgctggaaaacatgggcaacttggtcataattcaacacagaatgagctaagaccctgtttggtggctgagcttgttgggtatagagtgactcagatagcatgtggaaggtggcacacacttgcctatgtttctgatttgggaaaggtcttttcctttggttctggaaaagatggacaactgggaaatggtggaacacgtgaccagctgatgccgcttccagtgaaagtatcatcaagtgaagaactcaaacttgaaagccatacctcagaaaaggagttaataatgattgctggagggaatcaaagcattttgctctggataaagaaagagaattcatatgttaatctgaagaggacaattcctactctgaatgaagggactgtaaagagatggattgctgatgtggagactaaacggtggcagagcacaaaaagggaaatccaagagatattttcatctcctgcttgtctaactggaagttttttaaggaaaagaagaactacagaaatgatgcctgtttatttggacttaaataaagcaagaaacatcttcaaggagttaacccaaaaggactggattactaacatgataaccacctgcctcaaagataatctgctcaaaagacttccatttcattctccaccccaagaagctttagaaattttcttccttctcccagaatgtcctatgatgcatatttccaacaactgggagagccttgtggttccatttgcaaaggttgtttgtaaaatgagtgaccagtcttcactggttctggaagagtattgggcaactctgcaagaatccactttcagcaaactggtccagatgtttaaaacagccgtcatatgccagttggattactgggatgaaagtgctgaggagaatggtaatgttcaagctctcctagaaatgttgaagaagctgcacagggtaaaccaggtgaaatgtcaactacctgaaagtattttccaagtagacgaactcttgcaccgtctcaatttttttgtagaagtatgcagaaggtacttgtggaaaatgactgtggacgcttcagaaaatgtacaatgctgcgtcatattcagtcactttccatttatctttaataatctgtcgaaaattaaactactacatacagacacacttttaaaaatagagagtaaaaaacataaagcttatcttaggtcggcagcaattgaggaagaaagagagtctgaattcgctttgaggcccacgtttgatctaacagtcagaaggaatcacttgattgaggatgttttgaatcagctaagtcaatttgagaatgaagacctgaggaaagagttatgggtttcatttagtggagaaattgggtatgacctcggaggagtcaagaaagagttcttctactgtctgtttgcagagatgatccagccggaatatgggatgttcatgtatcctgaaggggcttcctgcatgtggtttcctgtcaagcctaaatttgagaagaaaagatacttcttttttggggttctatgtggactttccctgttcaattgcaatgttgccaaccttcctttcccactggcactgtttaagaaacttttggaccaaatgccatcattggaagacttgaaagaactcagtcctgatttgggaaagaatttgcaaacacttctggatgatgaaggtgataactttgaggaagtattttacatccattttaatgtgcactgggacagaaacgacacaaacttaattcctaatggaagtagcataactgtcaaccagactaacaagagagactatgtttctaagtatatcaattacattttcaacgactctgtaaaggcggtttatgaagaatttcggagaggattttataaaatgtgcgacgaagacattatcaaattattccaccccgaagaactgaaggatgtgattgttggaaatacagattatgattggaaaacatttgaaaagaatgcacgttatgaaccaggatataacagttcacatcccaccatagtgatgttttggaaggctttccacaaattgactctggaagaaaagaaaaaattccttgtatttcttacaggaactgacagactacaaatgaaagatttaaataatatgaaaataacattttgctgtcctgaaagttggaatgaaagagaccctataagagcactgacatgtttcagtgtcctcttcctccctaaatattctacaatggaaacagttgaagaagcgcttcaagaagccatcaacaacaacagaggatttggctga

SEQ ID NO: 308 - DNA, 3069 bp, Homo sapiens;
atgtacttctgttggggcgccgactccagggagctgcagcgccggaggacggcgggcagccccggggctgagctactgcaggcggccagcggggagcgccactctctgctgctgctgaccaaccacagggtcctctcgtgcggagacaacagcaggggtcagctgggccgcaggggcgcgcagcgcggggagctgccagaaccaattcaggcattggaaaccctaattgttgatctcgtgagctgcgggaaggagcactccctggctgtgtgccacaaaggaagggtcttcgcatggggagctggttctgaagggcagctggggattggagaattcaaggaaataagtttcacacctaagaaaataatgactctgaatgatataaaaataatacaagtttcctgtggacactaccactccctggcattatcaaaagatagccaagtgttttcgtggggaaagaacagccatgggcagctgggcttggggaaggagttcccctcccaagccagcccgcagagggtgaggtccctggaggggatcccactggctcaggtggctgccggaggggctcacagctttgccctgtctctctgtgggacttcgtttggctggggaagtaacagtgccgggcagctggccctcagtgggcgtaatgtcccagtgcaaagcaacaagcctctctcagtcggtgcactgaagaatctaggtgtggtttatatcagctgtggtgatgcacacactgcggtgcttacccaggacgggaaagtgttcacatttggagacaatcgctctggacagctgggatacagccccactcctgagaagagaggtccacaacttgtggaaagaattgatggcctagtttcgcagatagattgtggaagttatcacaccctggcatatgtgcacaccactggtcaggtggtatcttttggtcatggaccaagtgacacaagcaagccaactcatccggaggccctgacagagaactttgacattagctgcctgatttctgctgaagacttcgtggatgttcaagtcaaacacatttttgctggaacatatgccaactttgtgacaactcatcaggatactagttccacacgtgctcccgggaaaaccctgccagaaataagccgaattagccagtccatggcagaaaaatggatagcagtgaaaagaagaagtactgaacatgaaatggctaaaagtgaaattagaatgatattttcatctcctgcttgtctgactgcaagttttttaaagaaaagaggaactggagaaacgacttccattgatgtggacttagaaatggcaagagataccttcaagaagttaacaaaaaaggaatggatttcttccatgataactacgtgtctcgaggatgatctgctcagagctcttccatgccattctccacaccaagaagctttatcagttttcctcctgctcccagaatgtcctgtgatgcatgattctaagaactggaagaacctggtggttccatttgcaaaggctgtgtgtgaaatgagtaaacaatctttgcaagtcctaaagaagtgttgggcatttttgcaagaatcttctctgaatccgctgatccagatgcttaaagcagccatcatctctcagctgcttcatcagactaaaaccgaacaggatcactgtaatgttaaagctcttttaggaatgatgaaagaactgcataaggtaaacaaagctaactgtcgactaccagaaaatactttcaacataaatgaactctccaacttattaaacttttatatagatagaggaagacagctctttcgggataaccacctgatacctgcagaaacccccagtcctgttattttcagtgattttccatttatctttaattcgctatccaaaattaaattattgcaagctgattcacatataaagatgcagatgtcagaaaagaaagcatacatgcttatgcatgaaacaattctgcaaaaaaaggatgaatttcctccatcacccagatttatacttagagtcagacgaagtcgcctggttaaagatgctctgcgtcaattaagtcaagctgaagctactgacttctgcaaagtattagtggttgaatttattaatgaaatttgtcctgagtctggaggggttagttcagagttcttccactgtatgtttgaagagatgaccaagccagaatatggaatgttcatgtatcctgaaatgggttcctgcatgtggtttcctgccaagcctaaacctgagaagaaaagatatttcctctttggaatgctgtgtggactctccttattcaatttaaatgttgctaaccttcctttcccactggctctgtataaaaaacttctggaccaaaagccatcattggaagatttaaaagaactcagtcctcggttggggaagagtttgcaagaagttctagatgatgctgctgatgacattggagatgcgctctgcatacgcttttctatacactgggaccaaaatgatgttgacttaattccaaatgggatctccatacctgtggaccaaaccaacaagagagactatgtttctaagtatattgattacattttcaacgtctctgtaaaagcagtttatgaggaatttcagagaggattttatagagtctgtgagaaggagatacttagacatttctaccctgaagaactaatgacagcaatcattggaaatactgattatgactggaaacagtttgaacagaattcaaagtatgagcaaggataccaaaaatcacatcctactatacagttgttttggaaggctttccacaaactaaccttggatgaaaagaaaaaattcctctttttccttacaggacgtgataggctgcatgcaagaggcatacagaaaatggaaatagtatttcgctgtcctgaaactttcagtgaaagagatcacccaacatcaataacttgtcataatattctctccctccctaagtattctacaatggaaagaatggaggaagcacttcaagtagccatcaacaacaacagaggatttgtctcacccatgctcacacagtcataa

SEQ ID NO: 309 - DNA, 1908 bp, Homo sapiens;
atgagcggggcgggcagggcgctggccgcgctgctgctggccgcgtccgtgctgagcgccgcgctgctggcccccggcggctcttcggggcgcgatgcccaggccgcgccgccacgagacttagacaaaaaaagacatgcagagctgaagatggatcaggctttgctactcatccataatgaacttctctggaccaacttgaccgtctactggaaatctgaatgctgttatcactgcttgtttcaggttctggtaaacgttcctcagagtccaaaagcagggaagcctagtgctgcagctgcctctgtcagcacccagcacggatctatcctgcagctgaacgacaccttggaagagaaagaagtttgtaggttggaatacagatttggagaatttggaaactattctctcttggtaaagaacatccataatggagttagtgaaattgcctgtgacctggctgtgaacgaggatccagttgatagtaaccttcctgtgagcattgcattccttattggtcttgctgtcatcattgtgatatcctttctgaggctcttgttgagtttggatgactttaacaattggatttctaaagccataagttctcgagaaactgatcgcctcatcaattctgagctgggatctcccagcaggacagaccctctcgatggtgatgttcagccagcaacgtggcgtctatctgccctgccgccccgcctccgcagcgtggacaccttcagggggattgctcttatactcatggtctttgtcaattatggaggaggaaaatattggtacttcaaacatgcaagttggaatgggctgacagtggctgacctcgtgttcccgtggtttgtatttattatgggatcttccatttttctatcgatgacttctatactgcaacgggggtgttcaaaattcagattgctggggaagattgcatggaggagtttcctgttaatctgcataggaattatcattgtgaatcccaattattgccttggtccattgtcttgggacaaggtgcgcattcctggtgtgctgcagcgattgggagtgacatactttgtggttgctgtgttggagctcctctttgctaaacctgtgcctgaacattgtgcctcggagaggagctgcctttctcttcgagacatcacgtccagctggccccagtggctgctcatcctggtgctggaaggcctgtggctgggcttgacattcctcctgccagtccctgggtgccctactggttatcttggtcctgggggcattggagattttggcaagtatccaaattgcactggaggagctgcaggctacatcgaccgcctgctgctgggagacgatcacctttaccagcacccatcttctgctgtactttaccacaccgaggtggcctatgaccccgagggcatcctgggcaccatcaactccatcgtgatggcctttttaggagttcaggcaggaaaaatactattgtattacaaggctcggaccaaagacatcctgattcgattcactgcttggtgttgtattcttgggctcatttctgttgctctgacgaaggtttctgaaaatgaaggctttattccagtaaacaaaaatctctggtccctttcgtatgtcactacgctcagttcttttgccttcttcatcctgctggtcctgtacccagttgtggatgtgaaggggctgtggacaggaaccccattcttttatccaggaatgaattccattctggtatatgtcggccacgaggtgtttgagaactacttcccctttcagtggaagctgaaggacaaccagtcccacaaggagcacctgactcagaacatcgtcgccactgccctctgggtgctcattgcctacatcctctatagaaagaagattttttggaaaatctga

SEQ ID NO: 310 - DNA, 813 bp, Homo sapiens;
atgcagtacccgcaccccgggccggcggcgggcgccgtgggggtgccgctgtacgcgcccacgccgctgctgcaacccgcacacccgacgcccttttacatcgaggacatcctgggccgcgggcccgccgcgcccacgcccgcccccacgctgccgtcccccaactcctccttcaccagcctcgtgtccccctaccggaccccggtgtacgagcccacgccgatccatccagccttctcgcaccactccgccgccgcgctggccgctgcctacggacccggcggcttcgggggccctctgtaccccttcccgcggacggtgaacgactacacgcacgccctgctccgccacgaccccctgggcaaacctctactctggagccccttcttgcagaggcctctgcataaaaggaaaggcggccaggtgagattctccaacgaccagaccatcgagctggagaagaaattcgagacgcagaaatatctctctccgcccgagaggaagcgtctggccaagatgctgcagctcagcgagagacaggtcaaaacctggtttcagaatcgacgcgctaaatggaggagactaaaacaggagaaccctcaaagcaataaaaaagaagaactggaaagtttggacagttcctgtgatcagaggcaagatttgcccagtgaacagaataaaggtgcttctttggatagctctcaatgttcgccctcccctgcctcccaggaagaccttgaatcagagatttcagaggattctgatcaggaagtggacattgagggcgataaaagctattttaatgctggatga

SEQ ID NO: 311 - DNA, 3114 bp, Homo sapiens;
atggatcggatggccagctccatgaagcaggtgcccaacccactgcccaaggtgctgagccggcgcggggtcggcgctgggctggaggcggcggagcgcgagagcttcgagcggactcagactgtcagcatcaataaggccattaatacgcaggaagtggctgtaaaggaaaaacacgccagaacgtgcatactgggcacccaccatgagaaaggggcacagaccttctggtctgttgtcaaccgcctgcctctgtctagcaacgcagtgctctgctggaagttctgccatgtgttccacaaactcctccgagatggacacccgaacgtcctgaaggactctctgagatacagaaatgaattgagtgacatgagcaggatgtggggccacctgagcgaggggtatggccagctgtgcagcatctacctgaaactgctaagaaccaagatggagtaccacaccaaaaatcccaggttcccaggcaacctgcagatgagtgaccgccagctggacgaggctggagaaagtgacgtgaacaactttttccagttaacagtggagatgtttgactacctggagtgtgaactcaacctcttccaaacagtattcaactccctggacatgtcccgctctgtgtccgtgacggcagcagggcagtgccgcctcgccccgctgatccaggtcatcttggactgcagccacctttatgactacactgtcaagcttctcttcaaactccactcctgcctcccagctgacaccctgcaaggccaccgggaccgcttcatggagcagtttacaaagttgaaagatctgttctaccgctccagcaacctgcagtacttcaagcggctcattcagatcccccagctgcctgagaacccacccaacttcctgcgagcctcagccctgtcagaacatatcagccctgtggtggtgatccctgcagaggcctcatcccccgacagcgagccagtcctagagaaggatgacctcatggacatggatgcctctcagcagaatttatttgacaacaagtttgatgacatctttggcagttcattcagcagtgatcccttcaatttcaacagtcaaaatggtgtgaacaaggatgagaaggaccacttaattgagcgactatacagagagatcagtggattgaaggcacagctagaaaacatgaagactgagagccagcgggttgtgctgcagctgaagggccacgtcagcgagctggaagcagatctggccgagcagcagcacctgcggcagcaggcggccgacgactgtgaattcctgcgggcagaactggacgagctcaggaggcagcgggaggacaccgagaaggctcagcggagcctgtctgagatagaaaggaaagctcaagccaatgaacagcgatatagcaagctaaaggagaagtacagcgagctggttcagaaccacgctgacctgctgcggaagaatgcagaggtgaccaaacaggtgtccatggccagacaagcccaggtagatttggaacgagagaaaaaagagctggaggattcgttggagcgcatcagtgaccagggccagcggaagactcaagaacagctggaagttctagagagcttgaagcaggaacttgccacaagccaacgggagcttcaggttctgcaaggcagcctggaaacttctgcccagtcagaagcaaactgggcagccgagttcgccgagctagagaaggagcgggacagcctggtgagtggcgcagctcatagggaggaggaattatctgctcttcggaaagaactgcaggacactcagctcaaactggccagcacagaggaatctatgtgccagcttgccaaagaccaacgaaaaatgcttctggtggggtccaggaaggctgcggagcaggtgatacaagacgccctgaaccagcttgaagaacctcctctcatcagctgcgctgggtctgcagatcacctcctctccacggtcacatccatttccagctgcatcgagcaactggagaaaagctggagccagtatctggcctgcccagaagacatcagtggacttctccattccataaccctgctggcccacttgaccagcgacgccattgctcatggtgccaccacctgcctcagagccccacctgagcctgccgactcactgaccgaggcctgtaagcagtatggcagggaaaccctcgcctacctggcctccctggaggaagagggaagccttgagaatgccgacagcacagccatgaggaactgcctgagcaagatcaaggccatcggcgaggagctcctgcccaggggactggacatcaagcaggaggagctgggggacctggtggacaaggagatggcggccacttcagctgctattgaaactgccacggccagaatagaggagatgctcagcaaatcccgagcaggagacacaggagtcaaattggaggtgaatgaaaggatccttggttgctgtaccagcctcatgcaagctattcaggtgctcatcgtggcctctaaggacctccagagagagattgtggagagcggcaggggtacagcatcccctaaagagttttatgccaagaactctcgatggacagaaggacttatctcagcctccaaggctgtgggctggggagccactgtcatggtggatgcagctgatctggtggtacaaggcagagggaaatttgaggagctaatggtgtgttctcatgaaattgctgctagcacagcccagcttgtggctgcatccaaggtgaaagctgataaggacagccccaacctagcccagctgcagcaggcctctcggggagtgaaccaggccactgccggcgttgtggcctcaaccatttccggcaaatcacagatcgaagagacagacaacatggacttctcaagcatgacgctgacacagatcaaacgccaagagatggattctcaggttagggtgctagagctagaaaatgaattgcagaaggagcgtcaaaaactgggagagcttcggaaaaagcactacgagcttgctggtgttgctgagggctgggaagaaggaacagaggcatctccacctacactgcaagaagtggtaaccgaaaaagaatag

SEQ ID NO: 312 - DNA, 582 bp, Homo sapiens;
atgggcaaacagaacagcaagctgcggcccgaggtgctgcaggacctgcgggagaacacggagttcaccgaccacgagctgcaggagtggtacaagggcttcctcaaggactgccccaccggccacctgaccgtggacgagttcaagaagatctacgccaacttcttcccctacggcgacgcttccaagttcgccgagcacgtcttccgcaccttcgacaccaacggcgacggcaccatcgacttccgggagttcatcattgcgctgagcgtgacctcgcggggcaagctggagcagaagctcaagtgggccttcagcatgtacgacctggacggcaacggctacatcagccgcagcgagatgctggagatcgtgcaggccatctacaagatggtgtcgtctgtgatgaagatgccggaggatgagtccaccccggagaagcgcacagacaagatcttcaggcagatggacaccaacaatgacggcaaactgtccttggaagaattcatcagaggtgccaagagcgacccctccatcgtccgcctgctgcagtgcgaccccagcagtgccagtcagttctga

SEQ ID NO: 313 - DNA, 2103 bp, Homo sapiens;
atgaagtgcgtcttggtggccactgagggcgcagaggtcctcttctactggacagatcaggagtttgaagagagtctccggctgaagttcgggcagtcagagaatgaggaagaagagctccctgccctggaggaccagctcagcaccctcctagccccggtcatcatctcctccatgacgatgctggagaagctctcggacacctacacctgcttctccacggaaaatggcaacttcctgtatgtccttcacctgtttggagaatgcctgttcattgccatcaatggtgaccacaccgagagcgagggggacctgcggcggaagctgtatgtgctcaagtacctgtttgaagtgcactttgggctggtgactgtggacggtcatcttatccgaaaggagctgcggcccccagacctggcgcagcgtgtccagctgtgggagcacttccagagcctgctgtggacctacagccgcctgcgggagcaggagcagtgcttcgccgtggaggccctggagcgactgattcacccccagctctgtgagctgtgcatagaggcgctggagcggcacgtcatccaggctgtcaacaccagccccgagcggggaggcgaggaggccctgcatgccttcctgctcgtgcactccaagctgctggcattctactctagccacagtgccagctccctgcgcccggccgacctgcttgccctcatcctcctggttcaggacctctaccccagcgagagcacagcagaggacgacattcagccttccccgcggagggcccggagcagccagaacatccccgtgcagcaggcctggagccctcactccacgggcccaactggggggagctctgcagagacggagacagacagcttctccctccctgaggagtacttcacaccagctccttcccctggcgatcagagctcaggtagcaccatctggctggaggggggcaccccccccatggatgcccttcagatagcagaggacaccctccaaacactggttccccactgccctgtgccttccggccccagaaggatcttcctggatgccaacgtgaaggaaagctactgccccctagtgccccacaccatgtactgcctgcccctgtggcagggcatcaacctggtgctcctgaccaggagccccagcgcgcccctggccctggttctgtcccagctgatggatggcttctccatgctggagaagaagctgaaggaagggccggagcccggggcctccctgcgctcccagcccctcgtgggagacctgcgccagaggatggacaagtttgtcaagaatcgaggggcacaggagattcagagcacctggctggagtttaaggccaaggctttctccaaaagtgagcccggatcctcctgggagctgctccaggcatgtgggaagctgaagcggcagctctgcgccatctaccggctgaactttctgaccacagcccccagcaggggaggcccacacctgccccagcacctgcaggaccaagtgcagaggctcatgcgggagaagctgacggactggaaggacttcttgctggtgaagagcaggaggaacatcaccatggtgtcctacctagaagacttcccaggcttggtgcacttcatctatgtggaccgcaccactgggcagatggtggcgccttccctcaactgcagtcaaaagacctcgtcggagttgggcaaggggccgctggctgcctttgtcaaaactaaggtctggtctctgatccagctggcgcgcagatacctgcagaagggctacaccacgctgctgttccaggagggggatttctactgctcctacttcctgtggttcgagaatgacatggggtacaaactccagatgatcgaggtgcccgtcctctccgacgactcagtgcctatcggcatgctgggaggagactactacaggaagctcctgcgctactacagcaagaaccgcccaaccgaggctgtcaggtgctacgagctgctggccctgcacctgtctgtcatccccactgacctgctggtgcagcaggccggccagctggcccggcgcctctgggaggcctcccgtatccccctgctctag

SEQ ID NO: 314 - DNA, 1644 bp, Homo sapiens;
atggccaccatggtaccatccgtgttgtggcccagggcctgctggactctgctggtctgctgtctgctgaccccaggtgtccaggggcaggagttccttttgcgggtggagccccagaaccctgtgctctctgctggagggtccctgtttgtgaactgcagtactgattgtcccagctctgagaaaatcgccttggagacgtccctatcaaaggagctggtggccagtggcatgggctgggcagccttcaatctcagcaacgtgactggcaacagtcggatcctctgctcagtgtactgcaatggctctcagataacaggctcctctaacatcaccgtgtacaggctcccggagcgtgtggagctggcacccctgcctccttggcagccggtgggccagaacttcaccctgcgctgccaagtggaggatgggtcgccccggaccagcctcacggtggtgctgcttcgctgggaggaggagctgagccggcagcccgcagtggaggagccagcggaggtcactgccactgtgctggccagcagagacgaccacggagcccctttctcatgccgcacagaactggacatgcagccccaggggctgggactgttcgtgaacacctcagccccccgccagctccgaacctttgtcctgcccgtgacccccccgcgcctcgtggccccccggttcttggaggtggaaacgtcgtggccggtggactgcaccctagacgggctttttccagcctcagaggcccaggtctacctggcgctgggggaccagatgctgaatgcgacagtcatgaaccacggggacacgctaacggccacagccacagccacggcgcgcgcggatcaggagggtgcccgggagatcgtctgcaacgtgaccctagggggcgagagacgggaggcccgggagaacttgacggtctttagcttcctaggacccattgtgaacctcagcgagcccaccgcccatgaggggtccacagtgaccgtgagttgcatggctggggctcgagtccaggtcacgctggacggagttccggccgcggccccggggcagccagctcaacttcagctaaatgctaccgagagtgacgacggacgcagcttcttctgcagtgccactctcgaggtggacggcgagttcttgcacaggaacagtagcgtccagctgcgagtcctgtatggtcccaaaattgaccgagccacatgcccccagcacttgaaatggaaagataaaacgagacacgtcctgcagtgccaagccaggggcaacccgtaccccgagctgcggtgtttgaaggaaggctccagccgggaggtgccggtggggatcccgttcttcgtcaacgtaacacataatggtacttatcagtgccaagcgtccagctcacgaggcaaatacaccctggtcgtggtgatggacattgaggctgggagctcccactttgtccccgtcttcgtggcggtgttactgaccctgggcgtggtgactatcgtactggccttaatgtacgtcttcagggagcaccaacggagcggcagttaccatgttagggaggagagcacctatctgcccctcacgtctatgcagccgacagaagcaatgggggaagaaccgtccagagctgagtga

SEQ ID NO: 315 - DNA, 1335 bp, Homo sapiens;
atggcagtgacaactcgtttgacatggttgcacgaaaagatcctgcaaaatcattttggagggaagcggcttagccttctctataagggtagtgtccatggattccgtaatggagttttgcttgacagatgttgtaatcaagggcctactctaacagtgatttatagtgaagatcatattattggagcatatgcagaagagagttaccaggaaggaaagtatgcttccatcatcctttttgcacttcaagatactaaaatttcagaatggaaactaggactatgtacaccagaaacactgttttgttgtgatgttacaaaatataactccccaactaatttccagatagatggaagaaatagaaaagtgattatggacttaaagacaatggaaaatcttggacttgctcaaaattgtactatctctattcaggattatgaagtttttcgatgcgaagattcactggatgaaagaaagataaaaggggtcattgagctcaggaagagcttactgtctgccttgagaacttatgaaccatatggatccctggttcaacaaatacgaattctgctgctgggtccaattggagctgggaagtccagctttttcaactcagtgaggtctgttttccaagggcatgtaacgcatcaggctttggtgggcactaatacaactgggatatctgagaagtataggacatactctattagagacgggaaagatggcaaatacctgccgtttattctgtgtgactcactggggctgagtgagaaagaaggcggcctgtgcagggatgacatattctatatcttgaacggtaacattcgtgatagataccagtttaatcccatggaatcaatcaaattaaatcatcatgactacattgattccccatcgctgaaggacagaattcattgtgtggcatttgtatttgatgccagctctattcaatacttctcctctcagatgatagtaaagatcaaaagaattcgaagggagttggtaaacgctggtgtggtacatgtggctttgctcactcatgtggatagcatggatttgattacaaaaggtgaccttatagaaatagagagatgtgagcctgtgaggtccaagctagaggaagtccaaagaaaacttggatttgctctttctgacatctcggtggttagcaattattcctctgagtgggagctggaccctgtaaaggatgttctaattctttctgctctgagacgaatgctatgggctgcagatgacttcttagaggatttgccttttgagcaaatagggaatctaagggaggaaattatcaactgtgcacaaggaaaaaaatag

SEQ ID NO: 316 - DNA, 393 bp, Homo sapiens;
atgcggcagaaggcggtatcgcttttcttgtgctacctgctgctcttcacttgcagtggggtggaggcaggtaagaaaaagtgctcggagagctcggacagcggctccgggttctggaaggccctgaccttcatggccgtcggaggaggactcgcagtcgccgggctgcccgcgctgggcttcaccggcgccggcatcgcggccaactcggtggctgcctcgctgatgagctggtctgcgatcctgaatgggggcggcgtgcccgccggggggctagtggccacgctgcagagcctcggggctggtggcagcagcgtcgtcataggtaatattggtgccctgatgggctacgccacccacaagtatctcgatagtgaggaggatgaggagtag

SEQ ID NO: 317 - DNA, 3078 bp, Homo sapiens;
atgtcgaatgggtattccacagacgagaatttccgctatctcatctcgtgcttcagggccagggtgaaaatgtacatccaggtggagcctgtgctggactacctgacctttctgcctgcagaggtgaaggagcagattcagaggacagtcgccacctccgggaacatgcaggcagttgaactgctgctgagcaccttggagaagggagtctggcaccttggttggactcgggaattcgtggaggccctccggagaaccggcagccctctggccgcccgctacatgaaccctgagctcacggacttgccctctccatcgtttgagaacgctcatgatgaatatctccaactgctgaacctccttcagcccactctggtggacaagcttctagttagagacgtcttggataagtgcatggaggaggaactgttgacaattgaagacagaaaccggattgctgctgcagaaaacaatggaaatgaatcaggtgtaagagagctactaaaaaggattgtgcagaaagaaaactggttctctgcatttctgaatgttcttcgtcaaacaggaaacaatgaacttgtccaagagttaacaggctctgattgctcagaaagcaatgcagagattgagaatttatcacaagttgatggtcctcaagtggaagagcaacttctttcaaccacagttcagccaaatctggagaaggaggtctggggcatggagaataactcatcagaatcatcttttgcagattcttctgtagtttcagaatcagacacaagtttggcagaaggaagtgtcagctgcttagatgaaagtcttggacataacagcaacatgggcagtgattcaggcaccatgggaagtgattcagatgaagagaatgtggcagcaagagcatccccggagccagaactccagctcaggccttaccaaatggaagttgcccagccagccttggaagggaagaatatcatcatctgcctccctacagggagtggaaaaaccagagtggctgtttacattgccaaggatcacttagacaagaagaaaaaagcatctgagcctggaaaagttatagttcttgtcaataaggtactgctagttgaacagctcttccgcaaggagttccaaccatttttgaagaaatggtatcgtgttattggattaagtggtgatacccaactgaaaatatcatttccagaagttgtcaagtcctgtgatattattatcagtacagctcaaatccttgaaaactccctcttaaacttggaaaatggagaagatgctggtgttcaattgtcagacttttccctcattatcattgatgaatgtcatcacaccaacaaagaagcagtgtataataacatcatgaggcattatttgatgcagaagttgaaaaacaatagactcaagaaagaaaacaaaccagtgattccccttcctcagatactgggactaacagcttcacctggtgttggaggggccacgaagcaagccaaagctgaagaacacattttaaaactatgtgccaatcttgatgcatttactattaaaactgttaaagaaaaccttgatcaactgaaaaaccaaatacaggagccatgcaagaagtttgccattgcagatgcaaccagagaagatccatttaaagagaaacttctagaaataatgacaaggattcaaacttattgtcaaatgagtccaatgtcagattttggaactcaaccctatgaacaatgggccattcaaatggaaaaaaaagctgcaaaagaaggaaatcgcaaagaacgtgtttgtgcagaacatttgaggaagtacaatgaggccctacaaattaatgacacaattcgaatgatagatgcgtatactcatcttgaaactttctataatgaagagaaagataagaagtttgcagtcatagaagatgatagtgatgagggtggtgatgatgagtattgtgatggtgatgaagatgaggatgatttaaagaaacctttgaaactggatgaaacagatagatttctcatgactttattttttgaaaacaataaaatgttgaaaaggctggctgaaaacccagaatatgaaaatgaaaagctgaccaaattaagaaataccataatggagcaatatactaggactgaggaatcagcacgaggaataatctttacaaaaacacgacagagtgcatatgcgctttcccagtggattactgaaaatgaaaaatttgctgaagtaggagtcaaagcccaccatctgattggagctggacacagcagtgagttcaaacccatgacacagaatgaacaaaaagaagtcattagtaaatttcgcactggaaaaataaatctgcttatcgctaccacagtggcagaagaaggtctggatattaaagaatgtaacattgttatccgttatggtctcgtcaccaatgaaatagccatggtccaggcccgtggtcgagccagagctgatgagagcacctacgtcctggttgctcacagtggttcaggagttatcgaacatgagacagttaatgatttccgagagaagatgatgtataaagctatacattgtgttcaaaatatgaaaccagaggagtatgctcataagattttggaattacagatgcaaagtataatggaaaagaaaatgaaaaccaagagaaatattgccaagcattacaagaataacccatcactaataactttcctttgcaaaaactgcagtgtgctagcctgttctggggaagatatccatgtaattgagaaaatgcatcacgtcaatatgaccccagaattcaaggaactttacattgtaagagaaaacaaagcactgcaaaagaagtgtgccgactatcaaataaatggtgaaatcatctgcaaatgtggccaggcttggggaacaatgatggtgcacaaaggcttagatttgccttgtctcaaaataaggaattttgtagtggttttcaaaaataattcaacaaagaaacaatacaaaaagtgggtagaattacctatcacatttcccaatcttgactattcagaatgctgtttatttagtgatgaggattag

SEQ ID NO: 318 - DNA, 726 bp, Homo sapiens;
atggggactgcgagcagaagcaacatcgctcgccatctgcaaaccaatctcattctattttgtgtcggtgctgtgggcgcctgtactctctctgtcacacaaccgtggtacctagaagtggactacactcatgaggccgtcaccataaagtgtaccttctccgcaaccggatgcccttctgagcaaccaacatgcctgtggtttcgctacggtgctcaccagcctgagaacctgtgcttggacgggtgcaaaagtgaggcagacaagttcacagtgagggaggccctcaaagaaaaccaagtttccctcactgtaaacagagtgacttcaaatgacagtgcaatttacatctgtggaatagcattccccagtgtgccggaagcgagagctaaacagacaggaggagggaccacactggtggtaagagaaattaagctgctcagcaaggaactgcggagcttcctgacagctcttgtatcactgctctctgtctatgtgaccggtgtgtgcgtggccttcatactcctctccaaatcaaaatccaaccctctaagaaacaaagaaataaaagaagactcacaaaagaagaagagtgctcggcgtatttttcaggaaattgctcaagaactataccataagagacatgtggaaacaaatcagcaatctgagaaagataacaacacttatgaaaacagaagagtactttccaactatgaaaggccatag

SEQ ID NO: 319 - DNA, 2271 bp, Homo sapiens;
atgagctggtcaccttccctgacaacgcagacatgtggggcctgggaaatgaaagagcgccttgggacagggggatttggaaatgtcatccgatggcacaatcaggaaacaggtgagcagattgccatcaagcagtgccggcaggagctcagcccccggaaccgagagcggtggtgcctggagatccagatcatgagaaggctgacccaccccaatgtggtggctgcccgagatgtccctgaggggatgcagaacttggcgcccaatgacctgcccctgctggccatggagtactgccaaggaggagatctccggaagtacctgaaccagtttgagaactgctgtggtctgcgggaaggtgccatcctcaccttgctgagtgacattgcctctgcgcttagataccttcatgaaaacagaatcatccatcgggatctaaagccagaaaacatcgtcctgcagcaaggagaacagaggttaatacacaaaattattgacctaggatatgccaaggagctggatcagggcagtctttgcacatcattcgtggggaccctgcagtacctggccccagagctactggagcagcagaagtacacagtgaccgtcgactactggagcttcggcaccctggcctttgagtgcatcacgggcttccggcccttcctccccaactggcagcccgtgcagtggcattcaaaagtgcggcagaagagtgaggtggacattgttgttagcgaagacttgaatggaacggtgaagttttcaagctctttaccctaccccaataatcttaacagtgtcctggctgagcgactggagaagtggctgcaactgatgctgatgtggcacccccgacagaggggcacggatcccacgtatgggcccaatggctgcttcaaggccctggatgacatcttaaacttaaagctggttcatatcttgaacatggtcacgggcaccatccacacctaccctgtgacagaggatgagagtctgcagagcttgaaggccagaatccaacaggacacgggcatcccagaggaggaccaggagctgctgcaggaagcgggcctggcgttgatccccgataagcctgccactcagtgtatttcagacggcaagttaaatgagggccacacattggacatggatcttgtttttctctttgacaacagtaaaatcacctatgagactcagatctccccacggccccaacctgaaagtgtcagctgtatccttcaagagcccaagaggaatctcgccttcttccagctgaggaaggtgtggggccaggtctggcacagcatccagaccctgaaggaagattgcaaccggctgcagcagggacagcgagccgccatgatgaatctcctccgaaacaacagctgcctctccaaaatgaagaattccatggcttccatgtctcagcagctcaaggccaagttggatttcttcaaaaccagcatccagattgacctggagaagtacagcgagcaaaccgagtttgggatcacatcagataaactgctgctggcctggagggaaatggagcaggctgtggagctctgtgggcgggagaacgaagtgaaactcctggtagaacggatgatggctctgcagaccgacattgtggacttacagaggagccccatgggccggaagcaggggggaacgctggacgacctagaggagcaagcaagggagctgtacaggagactaagggaaaaacctcgagaccagcgaactgagggtgacagtcaggaaatggtacggctgctgcttcaggcaattcagagcttcgagaagaaagtgcgagtgatctatacgcagctcagtaaaactgtggtttgcaagcagaaggcgctggaactgttgcccaaggtggaagaggtggtgagcttaatgaatgaggatgagaagactgttgtccggctgcaggagaagcggcagaaggagctctggaatctcctgaagattgcttgtagcaaggtccgtggtcctgtcagtggaagcccggatagcatgaatgcctctcgacttagccagcctgggcagctgatgtctcagccctccacggcctccaacagcttacctgagccagccaagaagagtgaagaactggtggctgaagcacataacctctgcaccctgctagaaaatgccatacaggacactgtgagggaacaagaccagagtttcacggccctagactggagctggttacagacggaagaagaagagcacagctgcctggagcaggcctcatga

SEQ ID NO: 320 - DNA, 978 bp, Homo sapiens;
atggcgtggagccttgggagctggctgggtggctgcctgctggtgtcagcattgggaatggtaccacctcccgaaaatgtcagaatgaattctgttaatttcaagaacattctacagtgggagtcacctgcttttgccaaagggaacctgactttcacagctcagtacctaagttataggatattccaagataaatgcatgaatactaccttgacggaatgtgatttctcaagtctttccaagtatggtgaccacaccttgagagtcagggctgaatttgcagatgagcattcagactgggtaaacatcaccttctgtcctgtggatgacaccattattggaccccctggaatgcaagtagaagtacttgctgattctttacatatgcgtttcttagcccctaaaattgagaatgaatacgaaacttggactatgaagaatgtgtataactcatggacttataatgtgcaatactggaaaaacggtactgatgaaaagtttcaaattactccccagtatgactttgaggtcctcagaaacctggagccatggacaacttattgtgttcaagttcgagggtttcttcctgatcggaacaaagctggggaatggagtgagcctgtctgtgagcaaacaacccatgacgaaacggtcccctcctggatggtggccgtcatcctcatggcctcggtcttcatggtctgcctggcactcctcggctgcttcgccttgctgtggtgcgtttacaagaagacaaagtacgccttctcccctaggaattctcttccacagcacctgaaagagtttttgggccatcctcatcataacacacttctgtttttctcctttccattgtcggatgagaatgatgtttttgacaagctaagtgtcattgcagaagactctgagagcggcaagcagaatcctggtgacagctgcagcctcgggaccccgcctgggcaggggccccaaagctag

SEQ ID NO: 321 - DNA, 1284 bp, Homo sapiens;
atggagtggccggcgcggctctgcgggctgtgggcgctgctgctctgcgccggcggcgggggcgggggcgggggcgccgcgcctacggaaactcagccacctgtgacaaatttgagtgtctctgttgaaaacctctgcacagtaatatggacatggaatccacccgagggagccagctcaaattgtagtctatggtattttagtcattttggcgacaaacaagataagaaaatagctccggaaactcgtcgttcaatagaagtacccctgaatgagaggatttgtctgcaagtggggtcccagtgtagcaccaatgagagtgagaagcctagcattttggttgaaaaatgcatctcacccccagaaggtgatcctgagtctgctgtgactgagcttcaatgcatttggcacaacctgagctacatgaagtgttcttggctccctggaaggaataccagtcccgacactaactatactctctactattggcacagaagcctggaaaaaattcatcaatgtgaaaacatctttagagaaggccaatactttggttgttcctttgatctgaccaaagtgaaggattccagttttgaacaacacagtgtccaaataatggtcaaggataatgcaggaaaaattaaaccatccttcaatatagtgcctttaacttcccgtgtgaaacctgatcctccacatattaaaaacctctccttccacaatgatgacctatatgtgcaatgggagaatccacagaattttattagcagatgcctattttatgaagtagaagtcaataacagccaaactgagacacataatgttttctacgtccaagaggctaaatgtgagaatccagaatttgagagaaatgtggagaatacatcttgtttcatggtccctggtgttcttcctgatactttgaacacagtcagaataagagtcaaaacaaataagttatgctatgaggatgacaaactctggagtaattggagccaagaaatgagtataggtaagaagcgcaattccacactctacataaccatgttactcattgttccagtcatcgtcgcaggtgcaatcatagtactcctgctttacctaaaaaggctcaagattattatattccctccaattcctgatcctggcaagatttttaaagaaatgtttggagaccagaatgatgatactctgcactggaagaagtacgacatctatgagaagcaaaccaaggaggaaaccgactctgtagtgctgatagaaaacctgaagaaagcctctcagtga

SEQ ID NO: 322 - DNA, 1896 bp, Homo sapiens;
atggactatagctttgataccacagccgaagacccttgggttaggatttctgactgcatcaaaaacttatttagccccatcatgagtgagaaccatggccacatgcctctacagcccaatgccagcctgaatgaagaagaagggacacagggccacccagatgggaccccaccaaagctggacaccgccaatggcactcccaaagtttacaagtcagcagacagcagcactgtgaagaaaggtcctcctgtggctcccaagccagcctggtttcgccaaagcttgaaaggtttgaggaatcgtgcttcagacccaagagggctccctgatcctgccttgtccacccagccagcacctgcttccagggagcacctaggatcacacatccgggcctcctcctcctcctcctccatcaggcagagaatcagctcctttgaaacctttggctcctctcaactgcctgacaaaggagcccagagactgagcctccagccctcctctggggaggcagcaaaacctcttgggaagcatgaggaaggacggttttctggactcttggggcgaggggctgcacccactcttgtgccccagcagcctgagcaagtactgtcctcggggtcccctgcagcctccgaggccagagacccaggtgtgtctgagtcccctcccccagggcggcagcccaatcagaaaactctcccccctggcccggacccgctcctaaggctgctgtcaacacaggctgaggaatctcaaggcccagtgctcaagatgcctagccagcgagcacggagcttccccctgaccaggtcccagtcctgtgagacgaagctacttgacgaaaagaccagcaaactctattctatcagcagccaagtgtcatcggctgtcatgaaatccttgctgtgccttccatcttctatctcctgtgcccagactccctgcatccccaaggaaggggcatctccaacatcatcatccaacgaagactcagctgcaaatggttctgctgaaacatctgccttggacacagggttctcgctcaacctttcagagctgagagaatatacagagggtctcacggaagccaaggaagacgatgatggggaccacagttcccttcagtctggtcagtccgttatctccctgctgagctcagaagaattaaaaaaactcatcgaggaggtgaaggttctggatgaagcaacattaaagcaattagacggcatccatgtcaccatcttacacaaggaggaaggtgctggtcttgggttcagcttggcaggaggagcagatctagaaaacaaggtgattacggttcacagagtgtttccaaatgggctggcctcccaggaagggactattcagaagggcaatgaggttctttccatcaacggcaagtctctcaaggggaccacgcaccatgatgccttggccatcctccgccaagctcgagagcccaggcaagctgtgattgtcacaaggaagctgactccagaggccatgcccgacctcaactcctccactgactctgcagcctcagcctctgcagccagtgatgtttctgtagaatctacagcagaggccacagtctgcacggtgacactggagaagatgtcggcagggctgggcttcagcctggaaggagggaagggctccctacacggagacaagcctctcaccattaacaggattttcaaaggagcagcctcagaacaaagtgagacagtccagcctggagatgaaatcttacagctgggtggcactgccatgcagggcctcacacggtttgaagcctggaacatcatcaaggcactgcctgatggacctgtcacgattgtcatcaggagaaaaagcctccagtccaaggaaaccacagctgctggagactcctag

SEQ ID NO: 323 - DNA, 1713 bp, Homo sapiens;
atgacacttctgtggtgtgtagtgagtctctacttttatggaatcctgcaaagtgatgcctcagaacgctgcgatgactggggactagacaccatgaggcaaatccaagtgtttgaagatgagccagctcgcatcaagtgcccactctttgaacacttcttgaaattcaactacagcacagcccattcagctggccttactctgatctggtattggactaggcaggaccgggaccttgaggagccaattaacttccgcctccccgagaaccgcattagtaaggagaaagatgtgctgtggttccggcccactctcctcaatgacactggcaactatacctgcatgttaaggaacactacatattgcagcaaagttgcatttcccttggaagttgttcaaaaagacagctgtttcaattcccccatgaaactcccagtgcataaactgtatatagaatatggcattcagaggatcacttgtccaaatgtagatggatattttccttccagtgtcaaaccgactatcacttggtatatgggctgttataaaatacagaattttaataatgtaatacccgaaggtatgaacttgagtttcctcattgccttaatttcaaataatggaaattacacatgtgttgttacatatccagaaaatggacgtacgtttcatctcaccaggactctgactgtaaaggtagtaggctctccaaaaaatgcagtgccccctgtgatccattcacctaatgatcatgtggtctatgagaaagaaccaggagaggagctactcattccctgtacggtctattttagttttctgatggattctcgcaatgaggtttggtggaccattgatggaaaaaaacctgatgacatcactattgatgtcaccattaacgaaagtataagtcatagtagaacagaagatgaaacaagaactcagattttgagcatcaagaaagttacctctgaggatctcaagcgcagctatgtctgtcatgctagaagtgccaaaggcgaagttgccaaagcagccaaggtgaagcagaaagtgccagctccaagatacacagtggaactggcttgtggttttggagccacagtcctgctagtggtgattctcattgttgtttaccatgtttactggctagagatggtcctattttaccgggctcattttggaacagatgaaaccattttagatggaaaagagtatgatatttatgtatcctatgcaaggaatgcggaagaagaagaatttgtattactgaccctccgtggagttttggagaatgaatttggatacaagctgtgcatctttgaccgagacagtctgcctgggggaattgtcacagatgagactttgagcttcattcagaaaagcagacgcctcctggttgttctaagccccaactacgtgctccagggaacccaagccctcctggagctcaaggctggcctagaaaatatggcctctcggggcaacatcaacgtcattttagtacagtacaaagctgtgaaggaaacgaaggtgaaagagctgaagagggctaagacggtgctcacggtcattaaatggaaaggggaaaaatccaagtatccacagggcaggttctggaagcagctgcaggtggccatgccagtgaagaaaagtcccaggcggtctagcagtgatgagcagggcctctcgtattcatctttgaaaaatgtatga

SEQ ID NO: 324 - DNA, 1911 bp, Homo sapiens;
atgcggggaggcaggggcgcccctttctggctgtggccgctgcccaagctggcgctgctgcctctgttgtgggtgcttttccagcggacgcgtccccagggcagcgccgggccactgcagtgctacggagttggacccttgggcgacttgaactgctcgtgggagcctcttggggacctgggagccccctccgagttacacctccagagccaaaagtaccgttccaacaaaacccagactgtggcagtggcagccggacggagctgggtggccattcctcgggaacagctcaccatgtctgacaaactccttgtctggggcactaaggcaggccagcctctctggccccccgtcttcgtgaacctagaaacccaaatgaagccaaacgccccccggctgggccctgacgtggacttttccgaggatgaccccctggaggccactgtccattgggccccacctacatggccatctcataaagttctgatctgccagttccactaccgaagatgtcaggaggcggcctggaccctgctggaaccggagctgaagaccatacccctgacccctgttgagatccaagatttggagctagccactggctacaaagtgtatggccgctgccggatggagaaagaagaggatttgtggggcgagtggagccccattttgtccttccagacaccgccttctgctccaaaagatgtgtgggtatcagggaacctctgtgggacgcctggaggagaggaacctttgcttctatggaaggccccagggccctgtgtgcaggtgagctacaaagtctggttctgggttggaggtcgtgagctgagtccagaaggaattacctgctgctgctccctaattcccagtggggcggagtgggccagggtgtccgctgtcaacgccacaagctgggagcctctcaccaacctctctttggtctgcttggattcagcctctgccccccgtagcgtggcagtcagcagcatcgctgggagcacggagctactggtgacctggcaaccggggcctggggaaccactggagcatgtagtggactgggctcgagatggggaccccctggagaaactcaactgggtccggcttccccctgggaacctcagtgctctgttaccagggaatttcactgtcggggtcccctatcgaatcactgtgaccgcagtctctgcttcaggcttggcctctgcatcctccgtctgggggttcagggaggaattagcacccctagtggggccaacgctttggcgactccaagatgcccctccagggacccccgccatagcgtggggagaggtcccaaggcaccagcttcgaggccacctcacccactacaccttgtgtgcacagagtggaaccagcccctccgtctgcatgaatgtgagtggcaacacacagagtgtcaccctgcctgaccttccttggggtccctgtgagctgtgggtgacagcatctaccatcgctggacagggccctcctggtcccatcctccggcttcatctaccagataacaccctgaggtggaaagttctgccgggcatcctattcttgtggggcttgttcctgttggggtgtggcctgagcctggccacctctggaaggtgctaccacctaaggcacaaagtgctgccccgctgggtctgggagaaagttcctgatcctgccaacagcagttcaggccagccccacatggagcaagtacctgaggcccagccccttggggacttgcccatcctggaagtggaggagatggagcccccgccggttatggagtcctcccagcccgcccaggccaccgccccgcttgactctgggtatgagaagcacttcctgcccacacctgaggagctgggccttctggggccccccaggccacaggttctggcctga

SEQ ID NO: 325 - DNA, 2478 bp, Homo sapiens;
atggggtggctttgctctgggctcctgttccctgtgagctgcctggtcctgctgcaggtggcaagctctgggaacatgaaggtcttgcaggagcccacctgcgtctccgactacatgagcatctctacttgcgagtggaagatgaatggtcccaccaattgcagcaccgagctccgcctgttgtaccagctggtttttctgctctccgaagcccacacgtgtatccctgagaacaacggaggcgcggggtgcgtgtgccacctgctcatggatgacgtggtcagtgcggataactatacactggacctgtgggctgggcagcagctgctgtggaagggctccttcaagcccagcgagcatgtgaaacccagggccccaggaaacctgacagttcacaccaatgtctccgacactctgctgctgacctggagcaacccgtatccccctgacaattacctgtataatcatctcacctatgcagtcaacatttggagtgaaaacgacccggcagatttcagaatctataacgtgacctacctagaaccctccctccgcatcgcagccagcaccctgaagtctgggatttcctacagggcacgggtgagggcctgggctcagtgctataacaccacctggagtgagtggagccccagcaccaagtggcacaactcctacagggagcccttcgagcagcacctcctgctgggcgtcagcgtttcctgcattgtcatcctggccgtctgcctgttgtgctatgtcagcatcaccaagattaagaaagaatggtgggatcagattcccaacccagcccgcagccgcctcgtggctataataatccaggatgctcaggggtcacagtgggagaagcggtcccgaggccaggaaccagccaagtgcccacactggaagaattgtcttaccaagctcttgccctgttttctggagcacaacatgaaaagggatgaagatcctcacaaggctgccaaagagatgcctttccagggctctggaaaatcagcatggtgcccagtggagatcagcaagacagtcctctggccagagagcatcagcgtggtgcgatgtgtggagttgtttgaggccccggtggagtgtgaggaggaggaggaggtagaggaagaaaaagggagcttctgtgcatcgcctgagagcagcagggatgacttccaggagggaagggagggcattgtggcccggctaacagagagcctgttcctggacctgctcggagaggagaatgggggcttttgccagcaggacatgggggagtcatgccttcttccaccttcgggaagtacgagtgctcacatgccctgggatgagttcccaagtgcagggcccaaggaggcacctccctggggcaaggagcagcctctccacctggagccaagtcctcctgccagcccgacccagagtccagacaacctgacttgcacagagacgcccctcgtcatcgcaggcaaccctgcttaccgcagcttcagcaactccctgagccagtcaccgtgtcccagagagctgggtccagacccactgctggccagacacctggaggaagtagaacccgagatgccctgtgtcccccagctctctgagccaaccactgtgccccaacctgagccagaaacctgggagcagatcctccgccgaaatgtcctccagcatggggcagctgcagcccccgtctcggcccccaccagtggctatcaggagtttgtacatgcggtggagcagggtggcacccaggccagtgcggtggtgggcttgggtcccccaggagaggctggttacaaggccttctcaagcctgcttgccagcagtgctgtgtccccagagaaatgtgggtttggggctagcagtggggaagaggggtataagcctttccaagacctcattcctggctgccctggggaccctgccccagtccctgtccccttgttcacctttggactggacagggagccacctcgcagtccgcagagctcacatctcccaagcagctccccagagcacctgggtctggagccgggggaaaaggtagaggacatgccaaagcccccacttccccaggagcaggccacagacccccttgtggacagcctgggcagtggcattgtctactcagcccttacctgccacctgtgcggccacctgaaacagtgtcatggccaggaggatggtggccagacccctgtcatggccagtccttgctgtggctgctgctgtggagacaggtcctcgccccctacaacccccctgagggccccagacccctctccaggtggggttccactggaggccagtctgtgtccggcctccctggcaccctcgggcatctcagagaagagtaaatcctcatcatccttccatcctgcccctggcaatgctcagagctcaagccagacccccaaaatcgtgaactttgtctccgtgggacccacatacatgagggtctcttag

SEQ ID NO: 326 - DNA, 1407 bp, Homo sapiens;
atgctggccgtcggctgcgcgctgctggctgccctgctggccgcgccgggagcggcgctggccccaaggcgctgccctgcgcaggaggtggcgagaggcgtgctgaccagtctgccaggagacagcgtgactctgacctgcccgggggtagagccggaagacaatgccactgttcactgggtgctcaggaagccggctgcaggctcccaccccagcagatgggctggcatgggaaggaggctgctgctgaggtcggtgcagctccacgactctggaaactattcatgctaccgggccggccgcccagctgggactgtgcacttgctggtggatgttccccccgaggagccccagctctcctgcttccggaagagccccctcagcaatgttgtttgtgagtggggtcctcggagcaccccatccctgacgacaaaggctgtgctcttggtgaggaagtttcagaacagtccggccgaagacttccaggagccgtgccagtattcccaggagtcccagaagttctcctgccagttagcagtcccggagggagacagctctttctacatagtgtccatgtgcgtcgccagtagtgtcgggagcaagttcagcaaaactcaaacctttcagggttgtggaatcttgcagcctgatccgcctgccaacatcacagtcactgccgtggccagaaacccccgctggctcagtgtcacctggcaagacccccactcctggaactcatctttctacagactacggtttgagctcagatatcgggctgaacggtcaaagacattcacaacatggatggtcaaggacctccagcatcactgtgtcatccacgacgcctggagcggcctgaggcacgtggtgcagcttcgtgcccaggaggagttcgggcaaggcgagtggagcgagtggagcccggaggccatgggcacgccttggacagaatccaggagtcctccagctgagaacgaggtgtccacccccatgcaggcacttactactaataaagacgatgataatattctcttcagagattctgcaaatgcgacaagcctcccagtgcaagattcttcttcagtaccactgcccacattcctggttgctggagggagcctggccttcggaacgctcctctgcattgccattgttctgaggttcaagaagacgtggaagctgcgggctctgaaggaaggcaagacaagcatgcatccgccgtactctttggggcagctggtcccggagaggcctcgacccaccccagtgcttgttcctctcatctccccaccggtgtcccccagcagcctggggtctgacaatacctcgagccacaaccgaccagatgccagggacccacggagcccttatgacatcagcaatacagactacttcttccccagatag

SEQ ID NO: 327 - DNA, 2757 bp, Homo sapiens;
atgttgacgttgcagacttggctagtgcaagccttgtttattttcctcaccactgaatctacaggtgaacttctagatccatgtggttatatcagtcctgaatctccagttgtacaacttcattctaatttcactgcagtttgtgtgctaaaggaaaaatgtatggattattttcatgtaaatgctaattacattgtctggaaaacaaaccattttactattcctaaggagcaatatactatcataaacagaacagcatccagtgtcacctttacagatatagcttcattaaatattcagctcacttgcaacattcttacattcggacagcttgaacagaatgtttatggaatcacaataatttcaggcttgcctccagaaaaacctaaaaatttgagttgcattgtgaacgaggggaagaaaatgaggtgtgagtgggatggtggaagggaaacacacttggagacaaacttcactttaaaatctgaatgggcaacacacaagtttgctgattgcaaagcaaaacgtgacacccccacctcatgcactgttgattattctactgtgtattttgtcaacattgaagtctgggtagaagcagagaatgcccttgggaaggttacatcagatcatatcaattttgatcctgtatataaagtgaagcccaatccgccacataatttatcagtgatcaactcagaggaactgtctagtatcttaaaattgacatggaccaacccaagtattaagagtgttataatactaaaatataacattcaatataggaccaaagatgcctcaacttggagccagattcctcctgaagacacagcatccacccgatcttcattcactgtccaagaccttaaaccttttacagaatatgtgtttaggattcgctgtatgaaggaagatggtaagggatactggagtgactggagtgaagaagcaagtgggatcacctatgaagatagaccatctaaagcaccaagtttctggtataaaatagatccatcccatactcaaggctacagaactgtacaactcgtgtggaagacattgcctccttttgaagccaatggaaaaatcttggattatgaagtgactctcacaagatggaaatcacatttacaaaattacacagttaatgccacaaaactgacagtaaatctcacaaatgatcgctatctagcaaccctaacagtaagaaatcttgttggcaaatcagatgcagctgttttaactatccctgcctgtgactttcaagctactcaccctgtaatggatcttaaagcattccccaaagataacatgctttgggtggaatggactactccaagggaatctgtaaagaaatatatacttgagtggtgtgtgttatcagataaagcaccctgtatcacagactggcaacaagaagatggtaccgtgcatcgcacctatttaagagggaacttagcagagagcaaatgctatttgataacagttactccagtatatgctgatggaccaggaagccctgaatccataaaggcataccttaaacaagctccaccttccaaaggacctactgttcggacaaaaaaagtagggaaaaacgaagctgtcttagagtgggaccaacttcctgttgatgttcagaatggatttatcagaaattatactatattttatagaaccatcattggaaatgaaactgctgtgaatgtggattcttcccacacagaatatacattgtcctctttgactagtgacacattgtacatggtacgaatggcagcatacacagatgaaggtgggaaggatggtccagaattcacttttactaccccaaagtttgctcaaggagaaattgaagccatagtcgtgcctgtttgcttagcattcctattgacaactcttctgggagtgctgttctgctttaataagcgagacctaattaaaaaacacatctggcctaatgttccagatccttcaaagagtcatattgcccagtggtcacctcacactcctccaaggcacaattttaattcaaaagatcaaatgtattcagatggcaatttcactgatgtaagtgttgtggaaatagaagcaaatgacaaaaagccttttccagaagatctgaaatcattggacctgttcaaaaaggaaaaaattaatactgaaggacacagcagtggtattggggggtcttcatgcatgtcatcttctaggccaagcatttctagcagtgatgaaaatgaatcttcacaaaacacttcgagcactgtccagtattctaccgtggtacacagtggctacagacaccaagttccgtcagtccaagtcttctcaagatccgagtctacccagcccttgttagattcagaggagcggccagaagatctacaattagtagatcatgtagatggcggtgatggtattttgcccaggcaacagtacttcaaacagaactgcagtcagcatgaatccagtccagatatttcacattttgaaaggtcaaagcaagtttcatcagtcaatgaggaagattttgttagacttaaacagcagatttcagatcatatttcacaatcctgtggatctgggcaaatgaaaatgtttcaggaagtttctgcagcagatgcttttggtccaggtactgagggacaagtagaaagatttgaaacagttggcatggaggctgcgactgatgaaggcatgcctaaaagttacttaccacagactgtacggcaaggcggctacatgcctcagtga

SEQ ID NO: 328 - DNA, 3567 bp, Homo sapiens;; identical to SEQ ID NO: 36

SEQ ID NO: 329 - DNA, 2892 bp, Homo sapiens;
atgtggtgcctgcactgcaactcggagaggacccagtcccttctggagctagagcttgacagcggcgtcgagggcgaggcccccagcagtgagactggcacatccctggacagcccctcagcctacccccagggccccttggtgcccggttccagcctgagcccggatcactacgagcacacgtcagtgggagcctatgggctgtactcggggccgccggggcaacagcagcgcacgcggaggcccaagctgcagcactcgacctccatcctgcgcaagcaggctgaggaggaggccatcaagcgctcacgctcactctccgagagctatgagctctcctcggacctgcaggacaagcaggtggagatgctagaacgaaagtatggggggcgcctggtaacccgccatgcggcccgcaccatccagacggcgtttcgccagtaccagatgaacaagaacttcgagcgcttgcgcagctccatgtcagagaaccgcatgtcacgccggattgtgctgtccaacatgaggatgcagttctcctttgaggggcctgagaaagtgcacagctcctacttcgaggggaagcaggtctcagtgactaacgacggctcccagctgggagccctggtgtcccctgagtgtggtgacctcagcgagcccaccaccctcaagtctccggccccctccagtgactttgcggacgccatcaccgagctggaggacgccttctctaggcaagtgaaatcactggccgagtccatcgacgatgccctcaactgccgcagcctgcacactgaggaggcaccggccctggatgcggcgcgggcccgggacaccgaaccccagacagccctgcacggcatggaccaccgcaaactggacgagatgacggcctcgtacagtgatgtcaccctgtacatcgatgaggaggagctgtcgccccctctgcccctctcgcaggcaggggaccggccgtccagcaccgagtcggacctgcggctacgggctgggggcgcagccccagactactgggccctggcccacaaagaggacaaggctgacacggacacgagctgccggagcacgccgtcgctggagcggcaggagcagcggctgcgggtggagcatctgccgctgctcaccatcgagccacccagcgacagctctgtggaccttagtgaccgctcggagcgggggtcactcaagaggcagagtgcttacgagcgcagccttggcgggcagcagggcagtcccaagcatggtccccacagcggcgcccccaagagcctcccccgggaggagcctgagttgcggccccggccccccaggcccctggacagccacttggccatcaatggctcagccaaccggcagagcaagtctgagtcggactactcagacggtgacaatgacagcatcaacagcacgtccaactccaacgataccatcaactgcagctccgagtcatcgtcccgtgacagcctgcgggagcagacgctcagcaagcagacctaccacaaggaggcccgcaacagctgggactcgcctgcctttagcaacgatgtcatccgcaagaggcactaccgcatcggcctgaacctcttcaacaagaagcctgagaagggagtccagtacctcatcgagcgtggctttgtgcccgacacgcccgtcggggtggcccacttcctgctgcagcgcaagggcctcagccggcagatgatcggcgagttcctgggcaaccggcagaagcagttcaaccgtgacgtgctcgactgcgtcgtggacgagatggacttctctaccatggagctggatgaggccctcaggaaattccaggcgcacatccgtgtccaaggggaggctcagaaagtggagcggctcatagaggcgttcagccagcgctactgcatctgcaaccctggggtggtgcggcaattccggaacccagacaccattttcatcctggccttcgccatcatcctgctgaacaccgacatgtacagccccaatgtcaagcccgagcggaaaatgaagctagaggacttcatcaagaacctccgaggtgtggacgatggtgaggacattccccgtgagatgctgatggggatctatgaacggatccgtaagcgagagctaaagaccaatgaggaccatgtgtcccaggtgcagaaggtggagaagctcattgtggggaaaaagccgatcggatccctgcatcccgggctcggctgtgtgctctctctgccccaccgtcggttggtctgctactgccggctctttgaggttccagacccaaacaagccccagaaactcggactacaccagcgagaaatcttcctgttcaacgacctcctggtggtcaccaagatcttccagaagaagaagaactcggtgacgtacagcttccgacagtccttctccttgtacggcatgcaggtcctgctcttcgagaaccagtactaccccaatggcatccggctcacctcgtctgtccccggagcagatatcaaagtgttaataaacttcaacgcccccaaccctcaagaccggaagaaattcaccgatgacctgcgggagtccattgcggaagtccaagagatggagaagcacaggatagagtcggagctcgagaagcagaaaggcgtcgtgcggcccagcatgtcccagtgctctagcctcaaaaaggagtcgggcaacggaacactgagccgggcctgcctggacgacagctatgccagcggtgagggcctcaagcgcagcgccctcagcagctccctgcgggacctctcggaagccgggaagcgagggcgtcgcagcagtgcgggatcgctagagagcaatgtggaatttcagcctttcgagccactgcagccgtcagtgctgtgctcctaa

SEQ ID NO: 330 - DNA, 498 bp, Homo sapiens;
atgggctgggacctgacggtgaagatgctggcgggcaacgaattccaggtgtccctgagcagctccatgtcggtgtcagagctgaaggcgcagatcacccagaagatcggcgtgcacgccttccagcagcgtctggctgtccacccgagcggtgtggcgctgcaggacagggtcccccttgccagccagggcctgggccccggcagcacggtcctgctggtggtggacaaatgcgacgaacctctgagcatcctggtgaggaataacaagggccgcagcagcacctacgaggtacggctgacgcagaccgtggcccacctgaagcagcaagtgagcgggctggagggtgtgcaggacgacctgttctggctgaccttcgaggggaagcccctggaggaccagctcccgctgggggagtacggcctcaagcccctgagcaccgtgttcatgaatctgcgcctgcggggaggcggcacagagcctggcgggcggagctaa

SEQ ID NO: 331 - DNA, 3492 bp, Homo sapiens;
atgaccaggaccagggcagcactcctcctgttcacagccttagcaacttctctaggtttcaacttggacacagaggagctgacagccttccgtgtggacagcgctgggtttggagacagcgtggtccagtatgccaactcctgggtggtggttggagccccccaaaagataacagctgccaaccaaacgggtggcctctaccagtgtggctacagcactggtgcctgtgagcccatcggcctgcaggtgcccccggaggccgtgaacatgtccctgggcctgtccctggcgtctaccaccagcccttcccagctgctggcctgcggccccaccgtgcaccacgagtgcgggaggaacatgtacctcaccggactctgcttcctcctgggccccacccagctcacccagaggctcccggtgtccaggcaggagtgcccaagacaggagcaggacattgtgttcctgatcgatggctcaggcagcatctcctcccgcaactttgccacgatgatgaacttcgtgagagctgtgataagccagttccagagacccagcacccagttttccctgatgcagttctccaacaaattccaaacacacttcactttcgaggaattcaggcgcagctcaaaccccctcagcctgttggcttctgttcaccagctgcaagggtttacatacacggccaccgccatccaaaatgtcgtgcaccgattgttccatgcctcatatggggcccgtagggatgccgccaaaattctcattgtcatcactgatgggaagaaagaaggcgacagcctggattataaggatgtcatccccatggctgatgcagcaggcatcatccgctatgcaattggggttggattagcttttcaaaacagaaattcttggaaagaattaaatgacattgcatcgaagccctcccaggaacacatatttaaagtggaggactttgatgctctgaaagatattcaaaaccaactgaaggagaagatctttgccattgagggtacggagaccacaagcagtagctccttcgaattggagatggcacaggagggcttcagcgctgtgttcacacctgatggccccgttctgggggctgtggggagcttcacctggtctggaggtgccttcctgtaccccccaaatatgagccctaccttcatcaacatgtctcaggagaatgtggacatgagggactcttacctgggttactccaccgagctggccctctggaaaggggtgcagagcctggtcctgggggccccccgctaccagcacaccgggaaggctgtcatcttcacccaggtgtccaggcaatggaggatgaaggccgaagtcacggggactcagatcggctcctacttcggggcctccctctgctccgtggacgtagacagcgacggcagcaccgacctggtcctcatcggggccccccattactacgagcagacccgagggggccaggtgtctgtgtgtcccttgcccagggggtggagaaggtggtggtgtgatgctgttctctacggggagcagggccacccctggggtcgctttggggcggctctgacagtgctgggggatgtgaatggggacaagctgacagacgtggtcatcggggccccaggagaggaggagaaccggggtgctgtctacctgtttcacggagtcttgggacccagcatcagcccctcccacagccagcggatcgcgggctcccagctctcctccaggctgcagtattttgggcaggcactgagcgggggtcaagacctcacccaggatggactggtggacctggctgtgggggcccggggccaggtgctcctgctcaggaccagacctgtgctctgggtgggggtgagcatgcagttcatacctgccgagatccccaggtctgcgtttgagtgtcgggagcaggtggtctctgagcagaccctggtacagtccaacatctgcctttacattgacaaacgttctaagaacctgcttgggagccgtgacctccaaagctctgtgaccttggacctggccctcgaccctggccgcctgagtccccgtgccaccttccaggaaacaaagaaccggagtctgagccgagtccgagtcctcgggctgaaggcacactgtgaaaacttcaacctgctgctcccgagctgcgtggaggactctgtgacccccattaccttgcgtctgaacttcacgctggtgggcaagcccctccttgccttcagaaacctgcggcctatgctggccgccgatgctcagagatacttcacggcctccctaccctttgagaagaactgtggagccgaccatatctgccaggacaatctcggcatctccttcagcttcccaggcttgaagtccctgctggtggggagtaacctggagctgaacgcagaagtgatggtgtggaatgacggggaagactcctacggaaccaccatcaccttctcccaccccgcaggactgtcctaccgctacgtggcagagggccagaaacaagggcagctgcgttccctgcacctgacatgtgacagcgccccagttgggagccagggcacctggagcaccagctgcagaatcaaccacctcatcttccgtggcggcgcccagatcaccttcttggctacctttgacgtctcccccaaggctgtcctgggagaccggctgcttctgacagccaatgtgagcagtgagaacaacactcccaggaccagcaagaccaccttccagctggagctcccggtgaagtatgctgtctacactgtggttagcagccacgaacaattcaccaaatacctcaacttctcagagtctgaggagaaggaaagccatgtggccatgcacagataccaggtcaataacctgggacagagggacctgcctgtcagcatcaacttctgggtgcctgtggagctgaaccaggaggctgtgtggatggatgtggaggtctcccacccccagaacccatcccttcggtgctcctcagagaaaatcgcacccccagcatctgacttcctggcgcacattcagaagaatcccgtgctggactgctccattgctggctgcctgcggttccgctgtgacgtcccctccttcagcgtccaggaggagctggatttcaccctgaagggcaacctcagctttggctgggtccgccagatattgcagaagaaggtgtcggtcgtgagtgtggctgaaattacgttcgacacatccgtgtactcccagcttccaggacaggaggcatttatgagagctcagacgacaacggtgctggagaagtacaaggtccacaaccccacccccctcatcgtaggcagctccattgggggtctgttgctgctggcactcatcacagcggtactgtacaaagttggcttcttcaagcgtcagtacaaggaaatgatggaggaggcaaatggacaaattgccccagaaaacgggacacagacccccagcccgcccagtgagaaatga

SEQ ID NO: 332 - DNA, 2310 bp, Homo sapiens;
atgctgggcctgcgccccccactgctcgccctggtggggctgctctccctcgggtgcgtcctctctcaggagtgcacgaagttcaaggtcagcagctgccgggaatgcatcgagtcggggcccggctgcacctggtgccagaagctgaacttcacagggccgggggatcctgactccattcgctgcgacacccggccacagctgctcatgaggggctgtgcggctgacgacatcatggaccccacaagcctcgctgaaacccaggaagaccacaatgggggccagaagcagctgtccccacaaaaagtgacgctttacctgcgaccaggccaggcagcagcgttcaacgtgaccttccggcgggccaagggctaccccatcgacctgtactatctgatggacctctcctactccatgcttgatgacctcaggaatgtcaagaagctaggtggcgacctgctccgggccctcaacgagatcaccgagtccggccgcattggcttcgggtccttcgtggacaagaccgtgctgccgttcgtgaacacgcaccctgataagctgcgaaacccatgccccaacaaggagaaagagtgccagcccccgtttgccttcaggcacgtgctgaagctgaccaacaactccaaccagtttcagaccgaggtcgggaagcagctgatttccggaaacctggatgcacccgagggtgggctggacgccatgatgcaggtcgccgcctgcccggaggaaatcggctggcgcaacgtcacgcggctgctggtgtttgccactgatgacggcttccatttcgcgggcgacgggaagctgggcgccatcctgacccccaacgacggccgctgtcacctggaggacaacttgtacaagaggagcaacgaattcgactacccatcggtgggccagctggcgcacaagctggctgaaaacaacatccagcccatcttcgcggtgaccagtaggatggtgaagacctacgagaaactcaccgagatcatccccaagtcagccgtgggggagctgtctgaggactccagcaatgtggtccatctcattaagaatgcttacaataaactctcctccagggtcttcctggatcacaacgccctccccgacaccctgaaagtcacctacgactccttctgcagcaatggagtgacgcacaggaaccagcccagaggtgactgtgatggcgtgcagatcaatgtcccgatcaccttccaggtgaaggtcacggccacagagtgcatccaggagcagtcgtttgtcatccgggcgctgggcttcacggacatagtgaccgtgcaggttcttccccagtgtgagtgccggtgccgggaccagagcagagaccgcagcctctgccatggcaagggcttcttggagtgcggcatctgcaggtgtgacactggctacattgggaaaaactgtgagtgccagacacagggccggagcagccaggagctggaaggaagctgccggaaggacaacaactccatcatctgctcagggctgggggactgtgtctgcgggcagtgcctgtgccacaccagcgacgtccccggcaagctgatatacgggcagtactgcgagtgtgacaccatcaactgtgagcgctacaacggccaggtctgcggcggcccggggagggggctctgcttctgcgggaagtgccgctgccacccgggctttgagggctcagcgtgccagtgcgagaggaccactgagggctgcctgaacccgcggcgtgttgagtgtagtggtcgtggccggtgccgctgcaacgtatgcgagtgccattcaggctaccagctgcctctgtgccaggagtgccccggctgcccctcaccctgtggcaagtacatctcctgcgccgagtgcctgaagttcgaaaagggcccctttgggaagaactgcagcgcggcgtgtccgggcctgcagctgtcgaacaaccccgtgaagggcaggacctgcaaggagagggactcagagggctgctgggtggcctacacgctggagcagcaggacgggatggaccgctacctcatctatgtggatgagagccgagagtgtgtggcaggccccaacatcgccgccatcgtcgggggcaccgtggcaggcatcgtgctgatcggcattctcctgctggtcatctggaaggctctgatccacctgagcgacctccgggagtacaggcgctttgagaaggagaagctcaagtcccagtggaacaatgataatccccttttcaagagcgccaccacgacggtcatgaaccccaagtttgctgagagttag

SEQ ID NO: 333 - DNA, 2841 bp, Homo sapiens;
atggctgtgtactgctatgcgctcaatagcctggtgatcatgaatagcgccaacgagatgaagagcggcggcggcccggggcccagtggcagcgagacgcccccgcccccgaggagggcagtgctgagccccggcagcgttttcagccccgggagaggcgcctctttcctcttccccccagccgagtcgctgtcccccgaggagccccggagccccgggggctggcggagcggccggcgcaggctgaatagtagcagcggcagtggcagcggcagcagcggcagtagcgtgagcagcccaagttgggctggtcgcctgcgaggggaccggcagcaggtggtggcagccggtaccctctccccgccagggccggaggaggccaagaggaagctgcggatcttgcagcgcgagttgcagaacgtgcaggtgaaccagaaagtgggcatgtttgaggcgcacatccaggcacagagctccgccattcaagcgccccgcagcccgcgtttgggcagggctcgctcgccctccccgtgccccttccgcagcagcagtcagccccctggaagggtcctggttcagggcgcccggagcgaggaacggaggacaaagtcctggggggagcaatgtccagagacttcaggaaccgactccgggaggaaaggagggcccagcctatgctcctcgcaggtgaagaaaggaatgccacctcttcccggccgggctgcccctacaggatcagaggctcagggtccatccgcttttgtaaggatggagaagggtatccctgccagtccccgctgtggctcacccacagctatggaaattgacaaaaggggctctcctaccccgggaactcggagctgcctagctccctcattggggctgttcggagctagcttaacgatggccacggaagtggcagcgagagttacatccactgggccacaccgtccacaggatcttgccctcactgagccgtctgggagagcccgtgagcttgaggacctgcagcccccagaggccctggtggagaggcaggggcagtttctgggcagtgagacaagcccagccccagaaaggggcgggccccgcgatggagaaccccctgggaagatggggaaaggatatctgccctgtggcatgccgggctctggggagcctgaagtgggcaaaaggccagaggagacgactgtgagcgtgcaaagcgcagagtcctctgattccctgagctggtccaggctgcccagggccctggcctccgtaggccctgaggaggcccgaagtggggcccccgtgggcggggggcgttggcagctctccgacagagtggagggagggtccccaacgctgggcttgcttgggggcagcccctcagcacagccggggaccgggaatgtggaggcgggaattccttctggcagaatgctggagcctttgccctgttgggacgctgcgaaagatctgaaagaacctcagtgccctcctggggacagggtgggtgtgcagcctgggaactccagggtttggcagggcaccatggagaaagccggtttggcttggacgcgtggcacaggggtgcaatcagaggggacttgggaaagccagcggcaggacagtgatgccctcccaagtccggagctgctaccccaagatccggacaagcctttcctgaggaaggcctgcagccccagcaacatacctgctgtcatcattacagacatgggcacccaggaggatggggccttggaggagacgcagggaagccctcggggcaacctgcccctgaggaaactgtcctcttcctcggcctcctccacgggcttctcctcatcctacgaagactcagaggaggacatctccagtgaccctgagcgcaccctggaccccaactcagccttcctgcataccctggaccagcagaaacctagagtgagcaaatcatggaggaagataaaaaacatggtgcactggtctcccttcgtcatgtccttcaagaagaagtacccctggatccagctggcaggacacgcagggagtttcaaggcagctgccaatggcaggatcctgaagaagcactgtgagtcagagcagcgctgcctggaccggctgatggtggatgtgctgaggcccttcgtacctgcctaccatggggatgtggtgaaggacggggagcgctacaaccagatggacgacctgctggccgacttcgactcgccctgtgtgatggactgcaagatgggaatcaggacctacctggaggaggagctcacgaaggcccggaagaagcccagcctgcggaaggacatgtaccagaagatgatcgaggtggaccccgaggcccccaccgaggaggaaaaagcacagcgggctgtgaccaagccacggtacatgcagtggcgggagaccatcagctccacggccaccctggggttcaggatcgagggaatcaagaaagaagacggcaccgtgaaccgggacttcaagaagaccaaaacgagggagcaggtcaccgaggccttcagagagttcactaaaggaaaccataacatcctgatcgcctatcgggaccggctgaaggccattcgaaccactctagaagtttctcccttcttcaagtgccacgaggtcattggcagctccctcctcttcatccacgacaagaaggaacaggccaaagtgtggatgatcgactttgggaaaaccacgcccctgcctgagggccagaccctgcagcatgacgtcccctggcaggaggggaaccgggaggatggctacctctcggggctcaataacctcgtcgacatcctgaccgagatgtcccaggatgccccactcgcctga

SEQ ID NO: 334 - DNA, 5094 bp, Homo sapiens;
atgatggctcagtttcccacagctatgaatggagggccaaacatgtgggctattacctctgaagaacgtactaagcatgacaggcagtttgataacctcaaaccttcaggaggttacataacaggtgatcaagcacgtaattttttcctacaatcaggtctgccggcccctgttttagctgaaatatgggctttatcagacctaaacaaggatgggaagatggatcagcaagagttctccatagctatgaaactcatcaaactgaagcttcaaggccaacagttgcctgtggttctccctcctattatgaagcaaccccctatgttttctccattaatttctgctcgttttggaatgggaagcatgcccaatctgtccattcctcagccattgcctccagctgcacctataacatcattgtcttctgcgacttcagggaccaaccttcctcccttaatgatgcccactcccctagtgccttctgttagcacatcatcattaccaaatggaaccgccagtctcattcagcctttacccattccttattcttcttcaacattgcctcatgggtcatcttatagtctgatgatgggaggatttggaggtgctagtatacagaaagcgcagtctctgattgatttaggatctagtagctcaacttcctcgactgcttcactctcagggaactcacccaagactgggacctcagagtgggcagttcctcagcctacaagattaaaatatcggcaaaaatttaatactcttgacaaaagtatgagtggatatctctcaggttttcaagctagaaatgcccttcttcagtcaaatctttctcaaactcagctggctactatttggactctggctgacgttgatggtgatggacagctaaaagcagaagagtttattcttgcaatgcaccttactgacatggccaaagctggacagccattaccactgactttacctcctgagcttgttcctccatctttcagaggaggaaagcaaattgattccattaatggaactctgccttcatatcagaaaatgcaagaagaggagcctcagaagaaattaccagttacttttgaggacaaacggaaagccaactatgagcgagggaacatggagctggaaaagcgacgccaagccttgatggagcagcaacaaagggaggcagaacgtaaagcccagaaagaaaaggaagagtgggaacgaaaacagagagaattacaagaacaagaatggaagaaacaacttgaattagaaaaacgcttagagaagcaacgggaattggagagacaacgagaggaagaaaggagaaaagacatagaaagacgagaggcagcaaaacaggaacttgaacgacaacgtcgcttagaatgggagagaattcggcgacaggagcttctcaatcaaaagaatagagaacaagaagaaattgtcaggttaaactctaaaaagaagaatcttcatcttgagttggaagcactgaatggcaaacatcagcagatctcaggcagacttcaggatgtccgactcaaaaagcaaactcaaaagactgagctggaagttctggataagcagtgtgacttggaaattatggaaatcaagcaacttcaacaggaacttcaggaatatcagaataagcttatctatctggtacctgagaagcaattattaaatgaaagaattaaaaacatgcagttcagtaacacacctgattcaggggtcagtttacttcataaaaaatcattagaaaaggaagaattatgccaaagacttaaagaacagttagatgctcttgaaaaagaaactgcatctaagctgtcagaaatggattcttttaacaatcaactaaagtgtgggaatatggatgactctgttcttcagtgccttttgtctctgctaagctgtctcaacaacctcttcctcttacttaaggaactgagagaaacctacaacacacagcagttagcccttgaacagctttataagatcaaacgtgacaagttgaaggaaattgaaaggaaaagattagaactaatgcagaaaaagaaactagaagatgaggctgcaaggaaagcaaagcaaggaaaagaaaacttatggaaagaaaatcttagaaaggaggaagaagaaaaacaaaagcgactccaggaagaaaaaacacaagaaaaaattcaagaagaggaacggaaagctgaggagaaacaacgtaaggataaggatactttgaaagctgaggagaaaaaacgtgagacagctagtgttttggtgaattatagagcattatacccctttgaagcaaggaaccatgatgagatgagttttaattctggagatataattcaggttgatgaaaaaaccgtaggagaacctggttggctttatggtagttttcaaggaaattttggctggtttccatgcaattatgtagaaaaaatgccatcaagtgaaaatgaaaaagctgtatctccaaagaaggccttacttcctcctacagtttctttatctgctacctcaacttcctctgaaccactttcttcaaatcaaccagcatcagtgactgattatcaaaatgtatctttttcaaacctaactgtaaatacatcatggcagaaaaaatcagccttcactcgaactgtgtcccctggatctgtatcacctattcatggacagggacaagtggtagaaaacttaaaagcacaggccctttgttcctggactgcaaagaaagataaccacttgaacttctcaaaacatgacattattactgtcttggagcagcaagaaaattggtggtttggggaggtgcatggaggaagaggatggtttcccaaatcttatgtcaagatcattcctgggagtgaagtaaaacgggaagaaccagaagctttgtatgcagctgtaaataagaaacctacctcggcagcctattcagttggagaagaatatattgcactttatccatattcaagtgtggaacctggagatttgactttcacagaaggtgaagaaatattggtgacccagaaagatggagagtggtggacaggaagtattggagatagaagtggaatttttccatcaaactatgtcaaaccaaaggatcaagagagttttgggagtgctagcaagtctggagcatcaaataaaaaacctgagattgctcaggtaacttcagcatatgttgcttctggttctgaacaacttagccttgcaccaggacagttaatattaattctaaagaaaaatacaagtgggtggtggcaaggagagttacaggccagaggaaaaaagcgacagaaaggatggtttcctgccagtcatgttaaacttttgggtccaagtagtgaaagagccacacctgcctttcatcctgtatgtcaggtgattgctatgtatgactatgcagcaaataatgaagatgagctcagtttctccaagggacaactcattaatgttatgaacaaagatgatcctgattggtggcaaggagagatcaacggggtgactggtctctttccttcaaactacgttaagatgacgacagactcagatccaagtcaacagtggtgtgctgatctgcaaaccctggacacaatgcagccaattgagaggaaaagacagggctatattcatgagctgattcagaccgaagagcggtacatggctgaccttcagctcgtcgtcgaggtttttcagaaacgcatggcagagtcaggctttctcactgaaggggagatggccctgatttttgttaactggaaggagctcatcatgtccaacacaaagctgctgaaggctttgcgggtgcggaagaagaccgggggcgagaagatgccggtgcagatgattggggacatcctggccgctgagctgtcccacatgcaggcttacatcaggttctgcagctgccagcttaatggagcagctctgttacagcagaagacagatgaagacacagatttcaaagaatttttaaagaagctggcatctgacccgcggtgtaaaggaatgcccctctccagcttcctgctgaaacccatgcagaggatcacccgctacccactgctcatcagaagtattctggagaacaccccggagagccatgcagaccattcctccctaaagctggccctcgagcgggcagaggagctgtgctctcaagtgaatgagggagttcgggagaaggaaaactcggaccgactggagtggatccaggcgcacgtgcagtgtgaaggcctcgcggagcaacttattttcaactctctcaccaactgcctggggccccggaagctcttacacagtgggaaattatacaagaccaagagcaacaaggaactgcacggattcctcttcaatgacttcctgcttcttacctacatggtcaagcagtttgctgtttcctctggctctgagaaacttttcagctcgaagtccaatgctcaattcaaaatgtataaaacgcccattttcctgaatgaagtcttggtgaaactgcccacagacccttccagcgatgagcctgtcttccacatttcccacattgatcgggtctacaccctccgaacagacaacattaatgagaggaccgcctgggtgcagaagatcaaggcggcgtctgagcagtacatcgacaccgagaagaagaagcgtgagaaagcttaccaagcccgctcccaaaagacttcaggcattgggcgcctgatggtgcatgtcattgaagctacagaattaaaagcctgcaaaccaaatggaaagagcaacccatactgtgaaatcagcatgggctcccagagctacaccaccaggaccatccaggacacactcaatcccaagtggaattttaactgccagttctttattaaggatctctaccaagacgtgctgtgtctcaccctgtttgacagagaccagttttcaccagatgatttcctgggtcgtactgaaattccagtggcaaaaattcgaacagaacaggaaagcaaaggccctatgacccgccgactgctgctgcatgaggtccccaccggggaggtctgggtccgttttgacctgcagctttttgagcaaaaaactctcctgtag

SEQ ID NO: 335 - DNA, 3465 bp, Homo sapiens;
atgcagtatctaaatataaaagaggactgcaatgccatggctttctgtgctaaaatgaggagctccaagaagactgaggtgaacctggaggcccctgagccaggggtggaagtgatcttctatctgtcggacagggagcccctccggctgggcagtggagagtacacagcagaggaactgtgcatcagggctgcacaggcatgccgtatctctcctctttgtcacaacctctttgccctgtatgacgagaacaccaagctctggtatgctccaaatcgcaccatcaccgttgatgacaagatgtccctccggctccactaccggatgaggttctatttcaccaattggcatggaaccaacgacaatgagcagtcagtgtggcgtcattctccaaagaagcagaaaaatggctacgagaaaaaaaagattccagatgcaacccctctccttgatgccagctcactggagtatctgtttgctcagggacagtatgatttggtgaaatgcctggctcctattcgagaccccaagaccgagcaggatggacatgatattgagaacgagtgtctagggatggctgtcctggccatctcacactatgccatgatgaagaagatgcagttgccagaactgcccaaggacatcagctacaagcgatatattccagaaacattgaataagtccatcagacagaggaaccttctcaccaggatgcggataaataatgttttcaaggatttcctaaaggaatttaacaacaagaccatttgtgacagcagcgtgtccacgcatgacctgaaggtgaaatacttggctaccttggaaactttgacaaaacattacggtgctgaaatatttgagacttccatgttactgatttcatcagaaaatgagatgaattggtttcattcgaatgacggtggaaacgttctctactacgaagtgatggtgactgggaatcttggaatccagtggaggcataaaccaaatgttgtttctgttgaaaaggaaaaaaataaactgaagcggaaaaaactggaaaataaacacaagaaggatgaggagaaaaacaagatccgggaagagtggaacaatttttcttacttccctgaaatcactcacattgtaataaaggagtctgtggtcagcattaacaagcaggacaacaagaaaatggaactgaagctctcttcccacgaggaggccttgtcctttgtgtccctggtagatggctacttccggctcacagcagatgcccatcattacctctgcaccgacgtggcccccccgttgatcgtccacaacatacagaatggctgtcatggtccaatctgtacagaatacgccatcaataaattgcggcaagaaggaagcgaggaggggatgtacgtgctgaggtggagctgcaccgactttgacaacatcctcatgaccgtcacctgctttgagaagtctgagcaggtgcagggtgcccagaagcagttcaagaactttcagatcgaggtgcagaagggccgctacagtctgcacggttcggaccgcagcttccccagcttgggagacctcatgagccacctcaagaagcagatcctgcgcacggataacatcagcttcatgctaaaacgctgctgccagcccaagccccgagaaatctccaacctgctggtggctactaagaaagcccaggagtggcagcccgtctaccccatgagccagctgagtttcgatcggatcctcaagaaggatctggtgcagggcgagcaccttgggagaggcacgagaacacacatctattctgggaccctgatggattacaaggatgacgaaggaacttctgaagagaagaagataaaagtgatcctcaaagtcttagaccccagccacagggatatttccctggccttcttcgaggcagccagcatgatgagacaggtctcccacaaacacatcgtgtacctctatggcgtctgtgtccgcgacgtggagaatatcatggtggaagagtttgtggaagggggtcctctggatctcttcatgcaccggaaaagcgatgtccttaccacaccatggaaattcaaagttgccaaacagctggccagtgccctgagctacttggaggataaagacctggtccatggaaatgtgtgtactaaaaacctcctcctggcccgtgagggcatcgacagtgagtgtggcccattcatcaagctcagtgaccccggcatccccattacggtgctgtctaggcaagaatgcattgaacgaatcccatggattgctcctgagtgtgttgaggactccaagaacctgagtgtggctgctgacaagtggagctttggaaccacgctctgggaaatctgctacaatggcgagatccccttgaaagacaagacgctgattgagaaagagagattctatgaaagccggtgcaggccagtgacaccatcatgtaaggagctggctgacctcatgacccgctgcatgaactatgaccccaatcagaggcctttcttccgagccatcatgagagacattaataagcttgaagagcagaatccagatattgtttcagaaaaaaaaccagcaactgaagtggaccccacacattttgaaaagcgcttcctaaagaggatccgtgacttgggagagggccactttgggaaggttgagctctgcaggtatgaccccgaaggggacaatacaggggagcaggtggctgttaaatctctgaagcctgagagtggaggtaaccacatagctgatctgaaaaaggaaatcgagatcttaaggaacctctatcatgagaacattgtgaagtacaaaggaatctgcacagaagacggaggaaatggtattaagctcatcatggaatttctgccttcgggaagccttaaggaatatcttccaaagaataagaacaaaataaacctcaaacagcagctaaaatatgccgttcagatttgtaaggggatggactatttgggttctcggcaatacgttcaccgggacttggcagcaagaaatgtccttgttgagagtgaacaccaagtgaaaattggagacttcggtttaaccaaagcaattgaaaccgataaggagtattacaccgtcaaggatgaccgggacagccctgtgttttggtatgctccagaatgtttaatgcaatctaaattttatattgcctctgacgtctggtcttttggagtcactctgcatgagctgctgacttactgtgattcagattctagtcccatggctttgttcctgaaaatgataggcccaacccatggccagatgacagtcacaagacttgtgaatacgttaaaagaaggaaaacgcctgccgtgcccacctaactgtccagatgaggtttatcaacttatgaggaaatgctgggaattccaaccatccaatcggacaagctttcagaaccttattgaaggatttgaagcacttttaaaataa

SEQ ID NO: 336 - DNA, 1872 bp, Homo sapiens;
atgtccactcaagacgagaggcagatcaatactgaatatgctgtgtcattgttggaacagttgaaactgttttatgaacagcagttgtttactgacatagtgttaattgttgagggcactgaattcccttgtcataagatggttcttgcaacatgtagctcttatttcagggccatgtttatgagtggactaagtgaaagcaaacaaacccatgtacacctgaggaatgtcgatgctgccaccttacagataataataacttatgcatacacgggtaacttggcaatgaatgacagcactgtagaacagctttatgaaacagcttgcttcctacaggtagaagatgtgttacaacgttgtcgagaatatttaattaaaaaaataaatgcagagaattgtgtacgattgttgagttttgctgatctcttcagttgtgaggaattaaaacagagtgctaaaagaatggtggagcacaagttcactgctgtgtatcatcaggacgcgttcatgcagctgtcacatgacctactgatagatattctcagtagtgacaatttaaatgtagaaaaggaagaaaccgttcgagaagctgctatgctgtggctagagtataacacagaatcacgatcccagtatttgtcttctgttcttagccaaatcagaattgatgcactttcagaagtaacacagagagcttggtttcaaggtctgccacccaatgataagtcagtggtggttcaaggtctgtataagtccatgcccaagtttttcaaaccaagacttgggatgactaaagaggaaatgatgattttcattgaagcatcttcagaaaatccttgtagtctttactcttctgtctgttacagcccccaagcagaaaaagtttacaagttatgtagcccaccagctgatttgcataaggttgggaccgttgtaactcctgataatgatatctacatagcagggggtcaagttcctctgaaaaacacaaaaacaaatcacagtaaaacaagcaaacttcagactgccttcagaactgtgaattgcttttattggtttgatgcacagcaaaatacctggtttccaaagaccccaatgctttttgtccgcataaagccatctttggtttgctgtgaaggctatatctatgcaattggaggagatagcgtaggtggagaacttaatcggaggaccgtagaaagatacgacactgagaaagatgagtggacgatggtaagccctttaccttgtgcttggcaatggagtgcagcagttgtggttcatgactgcatttatgtgatgacactgaacctcatgtactgttattttccaaggtctgactcatgggtagaaatggccatgagacagactagtaggtcctttgcttcagctgcagcttttggtgataaaattttctatattggagggttgcatattgctaccaattccggcataagactcccctctggcactgtagatgggtcttcagtaactgtggaaatttatgatgtgaataaaaatgagtggaaaatggcagccaacatccctgctaagaggtactctgacccctgtgttagagctgttgtgatctcaaattctctatgtgtgtttatgcgagaaacccacttaaatgagcgagctaaatacgtcacctaccaatatgacctggaacttgaccggtggtctctgcggcagcatatatctgaacgtgtactgtgggacttggggagagattttcgatgcactgtggggaaactctatccatcctgccttgaagagtctccatggaaaccaccaacttatcttttttcaacggatgggacagaagagtttgaactggatggagaaatggttgcactaccacctgtatag

SEQ ID NO: 337 - DNA, 4188 bp, Homo sapiens;
atgtaccctatctgtacagttgttgtggatggtttgccatctgaaagctcctcaagttcttatccaggccctgtgtctgtttctgaaatgtctctgcttcatgctttgggtccagtgcagacctggctgggacaagagctcgagaaatgtggcattgatgccatgatttacactcggtatgtcctcagtcttctgctgcatgacagctatgactacgacctgcaggaacaggagaatgacatcttcctgggctgggaaaaaggagcttataagaaatggggaaagagtaagaaaaaatgttcagatctaactctagaagaaatgaaaaaacaggctgctgtccagtgtcttcgatctgcttctgatgaaagctctggtatcgagactttagtggaggagctctgctccagactgaaagaccttcagagtaagcaagaagagaagattcacaaaaagttagaggggtctccctctccagaggcagaattatcccctccagcaaaggatcaagtggaaatgtactatgaagcatttccaccactttctgagaaaccagtttgcctgcaagaaatcatgactgtgtggaacaagtctaaagtctgttcttactctagctcttcttcatcatccacagccccaccagctagcacagatacttcctctcctaaggactgcaacagtgaaagtgaagtcaccaaggaaagaagcagtgaagtacccaccactgtgcatgagaaaacccagagcaaaagcaaaaacgagaaggaaaacaaatttagtaatggcacaattgaagaaaagcctgctttgtacaaaaagcaaatccgacataaacctgaaggaaagattcgccctcgctcgtggtcttctggctccagtgaagcaggctcaagttccagtgggaatcagggagaattaaaagcatccatgaagtatgttaaagtaagacacaaggcacgagagattcgaaacaaaaaagggcggaatgggcaaagcaggctttctttgaagcacggtgaaaaggctgaaaggaacattcatactggaagtagtagcagtagcagcagtggttctgtcaaacagctgtgcaagcggggtaagagacctttaaaagaaatagggagaaaagatcctgggagcactgaaggaaaagacctgtacatggagaatagaaaggacacagagtataaagaggagcccttgtggtacaccgagccaattgctgaatattttgttcctctgagcagaaaaagtaaactagagaccacataccgaaacagacaggatacaagtgatctgacatcagaggcagtggaagaattgtctgaatcagtgcatggtctttgtatcagcaacaataatcttcataaaacatacctcgcagcaggtactttcattgatggtcattttgtagaaatgcctgcagttataaatgaggatattgacctcactgggacctcattatgttctctaccagaggacaataaatacctggatgatattcatctatcagaattaacgcacttctatgaagtggatattgatcaatccatgttggatcctggtgcctcagaaacaatgcaaggagaaagtcggattttgaatatgattcgacagaaaagcaaagagaacacagattttgaggcagaatgttgcatagtgttagatggtatggagttgcaaggggaacgtgcaatatggacagattctaccagctccgtaggtgctgagggcttattcctgcaggaccttggcaatctggctcagttttgggagtgctgttcatccagctccggtgatgctgatggggagagttttggaggagactctccagttagactctctcccatcttagacagcacagtgctcaattcacacctgcttgctggcaatcaagagctcttttcagatattaatgaaggatctggtataaactcttgtttttcagtgtttgaagtgcaatgcagtaattctgttttaccattttcttttgaaacactcaacttgggaaatgaaaatacagattctagtgctaatatgcttgggaaaacacagtctagattgctaatatggaccaaaaatagtgcctttgaagaaaatgaacactgttctaatctttcaacaagaacttgtagtccatggtcccattcagaagaaacacgttcagacaatgaaacattaaatattcagtttgaagaatccacacagtttaatgccgaagatattaattatgtagttcctagagtctcgtcaaattatgtagatgaagaacttctagattttttgcaagatgaaacttgccagcaaaacagtagaactttaggtgagattcctacattagttttcaaaaaaacatctaaactagaatccgtctgtggtattcagctagaacaaaaaacagaaaacaaaaattttgaaactacacaagtatgtaatgaaagtccacatggagatggctacagctcaggggttattaaagacatttggacaaagatggcagacacaaattctgtggctacagtagaaatagaaagaactgatgctgagttgttttcggcagatgtaaataactactgctgctgtctagatgctgaagctgaactggagacccttcaggagcctgataaggctgtgcggaggtcagagtaccatctgtgggagggacagaaagagagcctggagaaaagagcatttgcttctagtgagctatcaaacgtggatggtggtgattatacaacaccctctaaaccctgggatgtagcccaagataaagaaaacacattcattcttggaggagtttatggagaactcaaaaccttcaatagtgatggggagtgggcagtcgtaccacctagtcacacaaaaggaagtctgttacagtgtgcagcttctgatgttgtgacgatagctggtacagatgtctttatgaccccaggaaacagttttgctcctgggcacaggcagttatggaaacccttcgtgtcatttgaacagaatgatcagccgaagagtggggaaaatgggttaaataagggattttcttttatcttccatgaagacttactaggagcttgtggcaactttcaagtcgaagatcctggacttgaatactcattttcttcctttgacttaagcaatccattttcacaagttcttcatgtagaatgctcatttgaacctgaagggattgcatctttcagccccagttttaaaccgaaatcaatcctctgttctgattcagacagtgaagtgtttcaccccaggatatgtggtgttgacagaacacaatacagggctattcggatctctcctcggactcactttcgcccaatttctgcatccgaactgtccccaggaggaggaagcgagtcagaatttgaatctgagaaagatgaagcaaatattcccattccttctcaagttgatatatttgaagatccgcaggcagatctcaaacctttggaagaagatgcagagaaagaaggccattactatggaaaatcagagcttgagtctggaaaattccttcccaggttaaaaaaatctgggatggaaaagagtgctcagacatcactggattcccaggaggaatcaactgggattctttcagtaggaaagcaaaatcagtgtttggaatgtagcatgaatgaatccctggaaatagatttagaaagctcagaagcaaattgtaaaataatggcacaatgcgaggaagaaattaataatttttgtggttgcaaagcaggttgtcagtttcctgcttatgaagataatccagtttcttcgggacagctggaagagttccctgtattgaacactgatatacaaggaatgaatagaagtcaagaaaaacagacctggtgggaaaaagccttgtactctcctctttttcctgcatcagagtgtgaagaatgttacacaaatgccaagggagagagtggtttagaagaatatccagatgctaaagagacacccagtaatgaagagcgcctgttagattttaatagggtgtcttctgtttatgaagcaagatgtacaggagagagagattctggagcaaagtcagatggcttccgcggaaagatgtgctccagcgccagctccacctcggaagagacaggctcagaaggcggaggcgagtgggtgggccctagtgaagaggagctcttttctcgaactcatctctaa

SEQ ID NO: 338 - DNA, 912 bp, Homo sapiens;
atgtgccatggcaggatagcaccaaagagcacctcagtgtttgccgtggcctccgtgggacatggagtgttccttccgctagtgatcctttgcaccctgcttggagacggacttgcttccgtgtgccccctaccaccggagccagagaatggtggctacatctgccacccccggccctgcagagaccccctgacagcaggcagtgtcatcgaatacctgtgtgctgaaggctacatgttgaagggcgattacaaatacctgacgtgtaagaatggcgagtggaaaccagccatggagattagctgccgtctcaacgaggataaagacacccacacatcacttggggtccccacgctgtctatagtggcttctactgccagctccgtggcgctcattctcctcctcgtggtgctgtttgtgctgctgcagccaaagctgaagtctttccatcatagcaggcgtgaccagggggtatctggggaccaggtctccatcatggtggatggagtccaggttgcactaccatcatacgaggaggctgtatatggcagttctggtcactgtgtgccacctgctgaccccagagtacagattgtgctgtcagaagggtctgggcccagtgggaggagcgtgccaagggagcaacagctgccggaccaaggggcctgctcctctgcaggtggagaagatgaggccccaggccagtctggactatgtgaagcctggggctctcgggcctcagagactgtgatggtgcatcaggcaaccacctcttcctgggtggccggctcagggaaccgccaactggcacacaaagaaactgcagattcagagaacagtgacatacaaagccttttatccctcacgtcagaggagtacacagatgatattccactgttgaaagaagcatga

SEQ ID NO: 339 - DNA, 1236 bp, Homo sapiens;
atggagaccccagaggtccccgtgggctcgctaatcgactttgggcctgaggcacccacctcttctcccctggaggcaccaccccctgtgctgcaggacggcgatggctccctgggggacggtgcatcagagagtgagaccactgagtctgcggacagtgagaatgacatgggcgagtcgccctcgcacccgtcctgggaccaagaccgccgttcctcctccaacgagtccttctcctccaaccagagcaccgagtctacccaggatgaagagaccctggcactcagggacttcatgcgtggctacgtggagaagatcttctctggaggggaggacttggatcaggaggagaaagccaagtttggagagtactgcagcagtgaaaatggaaaaggccgggagtggtttgctcgatacgtgagtgcccagcgctgcaactccaagtgtgtctcagaggcaaccttctaccgcctggtgcagtcttttgcagtggtgctgttcgagtgtcatcagatggatgactttgggcctgccaagaacctcatgaccatgtgcttcacctactaccacatcggaaaaccacagctgctgcccccggagtcccgggagaagcccgcgggcagcatcgactcctacctgaaatccgcaaacagctggctggccgaaaagaaggacatcgccgagcggctgctgaagaacacctcggccaggactgagaatgtcaagggcttcttcggggggctggagaccaagctgaaggggcccctggccaggaggaacgaggaagacgagaacaaaccccaggagaagcggcccagggctgtgaccgcgtacagccccgaggacgaaaagaagggggagaagatctacctgtacacgcacctgaagcaacagcccatctggcacactctgaggttctggaatgcagccttttttgacgctgtccattgtgagaggacaaagcgatctcccactaccagaggggatgctggagaggaggaggagaagagggagaagtggtgccacatgacccaggaggagcgcgacgacagcctccggttcaacgagaacatcaccttcgggcagctgggcacattcacgcacaacatgctggcctttggactgaacaagaagctgtgcaatgacttcctgaagaagcaggctgtgattggcaacctggatgaagagcaatacaagctgcttagtgaccacattgagcaaatggccactgagtag

SEQ ID NO: 340 - DNA, 1038 bp, Homo sapiens;
atgctcatgtttgacccagttcctgtcaagcaagaggccatggaccctgtctcagtgtcatacccatctaattacatggaatccatgaagcctaacaagtatggggtcatctactccacaccattgcctgagaagttctttcagaccccagaaggtctgtcgcacggaatacagatggagccagtggacctcacggtgaacaagcggagttcacccccttcggctgggaattcgccctcctctctgaagttcccgtcctcacaccggagagcctcgcctgggttgagcatgccttcttccagcccaccgataaaaaaatactcacccccttctccaggcgtgcagcccttcggcgtgccgctgtccatgccaccagtgatggcagctgccctctcgcggcatggaatacggagcccggggatcctgcccgtcatccagccggtggtggtgcagcccgtcccctttatgtacacaagtcacctccagcagcctctcatggtctccttatcggaggagatggaaaattccagtagtagcatgcaagtacctgtaattgaatcatatgagaagcctatatcacagaaaaaaattaaaatagaacctgggatcgaaccacagaggacagattattatcctgaagaaatgtcaccccccttaatgaactcagtgtcccccccgcaagcattgttgcaagagaatcacccttcggtcatcgtgcagcctgggaagagacctttacctgtggaatccccggatactcaaaggaagcggaggatacacagatgtgattatgatggatgcaacaaagtgtacactaaaagctcccacttgaaagcacacagaagaacacacacaggagaaaaaccctacaaatgtacatgggaagggtgcacatggaagtttgctcggtctgatgaactaacaagacatttccgaaaacatactggaatcaaacctttccagtgcccggactgtgaccgcagcttctcccgttctgaccatcttgccctccataggaaacgccacatgctagtctga

SEQ ID NO: 341 - DNA, 852 bp, Homo sapiens;
atggacgtgctccccatgtgcagcatcttccaggagctccagatcgtgcacgagaccggctacttctcggcgctgccgtctctggaggagtactggcaacagacctgcctagagctggaacgttacctccagagcgagccctgctatgtttcagcctcagaaatcaaatttgacagccaggaagatctgtggaccaaaatcattctggctcgggagaaaaaggaggaatccgaactgaagatatcttccagtcctccagaggacactctcatcagcccgagcttttgttacaacttagagaccaacagcctgaactcagatgtcagcagcgaatcctctgacagctccgaggaactttctcccacggccaagtttacctccgaccccattggcgaagttttggtcagctcgggaaaattgagctcctctgtcacctccacgcctccatcttctccggaactgagcagggaaccttctcaactgtggggttgcgtgcccggggagctgccctcgccagggaaggtgcgcagcgggacttcggggaagccaggtgacaagggaaatggcgatgcctcccccgacggcaggaggagggtgcaccggtgccactttaacggctgcaggaaagtttacaccaaaagctcccacttgaaagcacaccagcggacgcacacaggagaaaagccttacagatgctcatgggaagggtgtgagtggcgttttgcaagaagtgatgagttaaccaggcacttccgaaagcacaccggggccaagccttttaaatgctcccactgtgacaggtgtttttccaggtctgaccacctggccctgcacatgaagaggcacctctga

SEQ ID NO: 342 - DNA, 909 bp, Homo sapiens;
atggacgtgttggctagttatagtatattccaggagctacaacttgtccacgacaccggctacttctcagctttaccatccctggaggagacctggcagcagacatgccttgaattggaacgctacctacagacggagccccggaggatctcagagacctttggtgaggacttggactgtttcctccacgcttcccctcccccgtgcattgaggaaagcttccgtcgcttagaccccctgctgctccccgtggaagcggccatctgtgagaagagctcggcagtggacatcttgctctctcgggacaagttgctatctgagacctgcctcagcctccagccggccagctcttctctagacagctacacagccgtcaaccaggcccagctcaacgcagtgacctcattaacgcccccatcgtcccctgagctcagccgccatctggtcaaaacctcacaaactctctctgccgtggatggcacggtgacgttgaaactggtggccaagaaggctgctctcagctccgtaaaggtgggaggggtcgcaacagctgcagcagccgtgacggctgcgggggccgttaagagtggacagagcgacagtgaccaaggagggctgggggctgaagcatgtcccgaaaacaagaagagggttcaccgctgtcagtttaacgggtgccggaaagtttatacaaaaagctcccacttaaaggcccaccagaggactcacacaggtgagaagccttataagtgctcatgggagggatgtgagtggcgttttgcacgaagcgatgagctcacgaggcactacaggaaacacacaggtgcaaagcccttcaaatgcaaccactgcgacaggtgtttttccaggtctgaccatcttgccctccacatgaagagacatatctaa

SEQ ID NO: 343 - DNA, 1782 bp, Homo sapiens;
atggagacgccgccgctgcctcccgcatgcacaaagcagggtcatcagaagcctctcgattcaaaagatgataataccgaaaaacactgcccagtgacagtgaatccttggcatatgaagaaagctttcaaagtcatgaacgaattaagaagtcaaaatttgctgtgcgatgtcacaattgtggcagaagacatggaaatttctgctcatagagtggtgctggccgcctgtagtccttattttcatgccatgtttacaggtgagatgagtgagagccgagcaaagagagttagaataaaagaggtagatggctggaccctgaggatgctaattgattatgtttacactgcagaaattcaggttacagaagaaaatgtacaggtacttctcccagcagctggtctcttacagttacaggatgtgaagaagacttgttgtgaatttttggaatcccagcttcaccctgtcaactgcttaggaatccgggcttttgctgatatgcatgcatgtaccgaccttctgaacaaggccaacacctatgcagagcaacattttgcagatgttgtacttagtgaagaatttctcaatcttggcatcgaacaagtgtgcagcttaatctcaagtgacaaacttaccatttcttcagaagagaaggtatttgaagcagtaatagcatgggtgaaccatgacaaggatgtgaggcaagagtttatggcccgactgatggaacatgtacggttacctttgcttcctcgggaatatttagttcagagggttgaagaggaagcattggtcaagaatagcagtgcttgcaaagattacctcattgaagcaatgaagtaccatttgctgccaacagagcagcgtatattaatgaagagtgtccggacccggctgaggacacccatgaaccttcccaaattgatggtggtggttgggggccaagcaccaaaggctatccggagtgtggaatgctatgactttaaagaagaaaggtggcaccaagtagcagagttgccttccaggaggtgcagggcaggcatggtctacatggctggacttgtttttgctgttggtggctttaatggctcattaagagttcgcactgtagattcctacgaccctgtgaaggaccagtggaccagcgttgctaacatgagagaccggagaagcactttgggagctgctgtgttaaatggattattatacgctgtgggaggctttgatgggagtacaggtttgtcatctgtggaagcatacaacataaagtctaatgagtggtttcatgtagctcccatgaatacaaggaggagcagtgttggtgtgggtgttgttggaggtttgctctatgctgtaggaggttatgatggagcatcacgtcagtgtcttagcacagtagaatgctataatgctacaacaaatgagtggacctatatagcagaaatgagcaccaggcggagtggagcaggtgttggtgtgttaaacaatttattgtatgctgtaggaggtcatgatggccctttagtacgaaaaagtgttgaagtatatgatcccaccactaacgcatggagacaggttgcagatatgaacatgtgcagaagaaatgcaggagtttgtgcagttaatggtctgttatatgttgttggaggggatgatggttcctgtaacttggcgtcagtagaatattataacccaacaaccgataaatggacagttgtgtcatcgtgtatgagcacagggagaagttatgcaggggtcacagttattgataaaccattatga

SEQ ID NO: 344 - DNA, 1560 bp, Homo sapiens;
atgttcttgctgcctcttccggctgcggggcgagtagtcgtccgacgtctggccgtgagacgtttcgggagccggagtctctccaccgcagacatgacgaagggccttgttttaggaatctattccaaagaaaaagaagatgatgtgccacagttcacaagtgcaggagagaattttgataaattgttagctggaaagctgagagagactttgaacatatctggaccacctctgaaggcagggaagactcgaaccttttatggtctgcatcaggacttccccagcgtggtgctagttggcctcggcaaaaaggcagctggaatcgacgaacaggaaaactggcatgaaggcaaagaaaacatcagagctgctgttgcagcggggtgcaggcagattcaagacctggagctctcgtctgtggaggtggatccctgtggagacgctcaggctgctgcggagggagcggtgcttggtctctatgaatacgatgacctaaagcaaaaaaagaagatggctgtgtcggcaaagctctatggaagtggggatcaggaggcctggcagaaaggagtcctgtttgcttctgggcagaacttggcacgccaattgatggagacgccagccaatgagatgacgccaaccagatttgctgaaattattgagaagaatctcaaaagtgctagtagtaaaaccgaggtccatatcagacccaagtcttggattgaggaacaggcaatgggatcattcctcagtgtggccaaaggatctgacgagcccccagtcttcttggaaattcactacaaaggcagccccaatgcaaacgaaccacccctggtgtttgttgggaaaggaattacctttgacagtggtggtatctccatcaaggcttctgcaaatatggacctcatgagggctgacatgggaggagctgcaactatatgctcagccatcgtgtctgctgcaaagcttaatttgcccattaatattataggtctggcccctctttgtgaaaatatgcccagcggcaaggccaacaagccgggggatgttgttagagccaaaaacgggaagaccatccaggttgataacactgatgctgaggggaggctcatactggctgatgcgctctgttacgcacacacgtttaacccgaaggtcatcctcaatgccgccaccttaacaggtgccatggatgtagctttgggatcaggtgccactggggtctttaccaattcatcctggctctggaacaaactcttcgaggccagcattgaaacaggggaccgtgtctggaggatgcctctcttcgaacattatacaagacaggttgtagattgccagcttgctgatgttaacaacattggaaaatacagatctgcaggagcatgtacagctgcagcattcctgaaagaattcgtaactcatcctaagtgggcacatttagacatagcaggcgtgatgaccaacaaagatgaagttccctatctacggaaaggcatgactgggaggcccacaaggactctcattgagttcttacttcgtttcagtcaagacaatgcttag

SEQ ID NO: 345 - DNA, 789 bp, Homo sapiens;
atggacccccgcttgtccactgtccgccagacctgctgctgcttcaatgtccgcatcgcaaccaccgccctggccatctaccatgtgatcatgagcgtcttgttgttcatcgagcactcagtagaggtggcccatggcaaggcgtcctgcaagctctcccagatgggctacctcaggatcgctgacctgatctccagcttcctgctcatcaccatgctcttcatcatcagcctgagcctactgatcggcgtagtcaagaaccgggagaagtacctgctgcccttcctgtccctgcaaatcatggactatctcctgtgcctgctcaccctgctgggctcctacattgagctgcccgcctacctcaagttggcctcccggagccgtgctagctcctccaagttccccctgatgacgctgcagctgctggacttctgcctgagcatcctgaccctctgcagctcctacatggaagtgcccacctatctcaacttcaagtccatgaaccacatgaattacctccccagccaggaggatatgcctcataaccagttcatcaagatgatgatcatcttttccatcgccttcatcactgtccttatcttcaaggtctacatgttcaagtgcgtgtggcggtgctacagattgatcaagtgcatgaactcggtggaggagaagagaaactccaagatgctccagaaggtggtcctgccgtcctacgaggaagccctgtctttgccatcgaagaccccagaggggggcccagcaccacccccatactcagaggtgtga

SEQ ID NO: 346 - DNA, 732 bp, Homo sapiens;
atgagctcggggactgaactgctgtggcccggagcagcgctgctggtgctgttgggggtggcagccagtctgtgtgtgcgctgctcacgcccaggtgcaaagaggtcagagaaaatctaccagcagagaagtctgcgtgaggaccaacagagctttacggggtcccggacctactccttggtcgggcaggcatggccaggacccctggcggacatggcacccacaaggaaggacaagctgttgcaattctaccccagcctggaggatccagcatcttccaggtaccagaacttcagcaaaggaagcagacacgggtcggaggaagcctacatagaccccattgccatggagtattacaactgggggcggttctcgaagcccccagaagatgatgatgccaattcctacgagaatgtgctcatttgcaagcagaaaaccacagagacaggtgcccagcaggagggcataggtggcctctgcagaggggacctcagcctgtcactggccctgaagactggccccacttctggtctctgtccctctgcctccccggaagaagatgaggaatctgaggattatcagaactcagcatccatccatcagtggcgcgagtccaggaaggtcatggggcaactccagagagaagcatcccctggcccggtgggaagcccagacgaggaggacggggaaccggattacgtgaatggggaggtggcagccacagaagcctag

SEQ ID NO: 347 - DNA, 1602 bp, Homo sapiens;
atggcactgaggaatgtgccctttcgctcagaggtcctgggctgggaccccgacagccttgctgactatttcaagaagctcaactataaggactgtgagaaggcagtgaagaagtaccacatcgatggggctcgcttcttgaacctgacagaaaatgacatccagaagttccccaagctccgggtgccgattctcagtaagttaagtcaggaaatcaacaagaacgaagagaggaggagcatcttcacacgcaaaccccaagtcccgcggtttcctgaagagacagaaagccacgaagaggacaatgggggctggtcgtcctttgaagaagacgattatgaaagtcccaatgatgaccaggatggggaggatgatggagactatgagtcccccaatgaggaggaagaggcacccgtggaagatgacgcggattatgagccgccaccctccaatgacgaggaagctctgcagaactccatcctgcctgccaagcctttccccaactccaactccatgtacatcgaccggcccccctctgggaaaaccccccagcagcctcctgtgcccccccagagaccgatggccgccctcccgcccccaccagccggccggaatcactcgccactgcccccaccccagaccaaccacgaagaacccagcagaagcagaaaccacaaaacggcaaagctccctgctccttcaatagacagaagcacgaaacctcccctagatcgttcattagctccgtttgatagagaacccttcacactaggaaagaaaccaccattttctgacaagccctcgattccagcgggaaggtcactcggggagcatttacccaagattcaaaagcctcctttaccaccgaccacggaaagacatgaaaggagcagccccctgccagggaagaagccacctgtgccaaagcatggatggggaccagacagaagagagaatgatgaagatgatgtgcatcagagacctttgccccagccagcactacttcctatgagctccaacactttcccttcaagatctactaagccaagtcccatgaaccctctcccatcctctcacatgcctggagcattctcagaaagtaacagcagttttccacagagtgcctccctgccaccatacttctctcaaggccctagcaacagaccacctatcagagccgaaggcagaaacttccccttgccacttccaaacaaacctcggcccccatcccccgcggaggaagagaattcattaaatgaagagtggtacgtttcttatattacccgaccagaggcagaagctgctcttagaaagataaaccaggatggcacatttctggtcagagacagctctaaaaaaacaacaaccaatccatatgtcctcatggtgttgtacaaagataaagtttacaacatccagatccgttatcagaaggaaagtcaagtttacttgttgggaactggactccgagggaaagaggactttctgtctgtgtcagatattattgactacttcaggaaaatgccacttctgctcattgatgggaaaaaccgaggttccagataccagtgcacattaacgcatgctgcagggtacccatag

SEQ ID NO: 348 - DNA, 927 bp, Homo sapiens;
atggacgcgctcaagtcggcggggcgggcgctgatccggagccccagcttggccaagcagagctgggggggcggtggccggcaccgcaagctgcctgagaactggacagacacgcgggagacgctgctggaggggatgctgttcagcctcaagtacctgggcatgacgctagtggagcagcccaagggtgaggagctgtcggccgccgccatcaagaggatcgtggctacagctaaggccagtgggaagaagctgcagaaggtgactctgaaggtgtcgccacggggaattatcctgacagacaacctcaccaaccagctcattgagaacgtgtccatatacaggatctcctattgcacagcagacaagatgcacgacaaggtgtttgcatacatcgcccagagccagcacaaccagagcctcgagtgccacgccttcctctgcaccaagcggaagatggcacaggctgttaccctcaccgtagcccaggccttcaaagtcgcctttgagttttggcaggtgtccaaggaagagaaagagaagagggacaaagccagccaagagggaggggacgtcctgggggcccgccaagactgcaccccctccttgaagagcttggtcgccactgggaacctgctggacttagaggagacagctaaggccccgctgtccacggtcagcgccaacaccaccaacatggacgaggtgccgcggccacaagccttgagtggcagcagtgttgtctgggagctggatgatggcctggatgaagcgttttcgaggcttgcccagtctcggacaaaccctcaggtcctggacactggcctgacagcccaggacatgcattacgcccagtgcctctcgcctgtcgactgggacaagcctgacagcagcggcacagagcaggatgacctcttcagcttctga

SEQ ID NO: 349 - DNA, 1200 bp, Homo sapiens;
atgccccaactctccggaggaggtggcggcggcgggggggacccggaactctgcgccacggacgagatgatccccttcaaggacgagggcgatcctcagaaggaaaagatcttcgccgagatcagtcatcccgaagaggaaggcgatttagctgacatcaagtcttccttggtgaacgagtctgaaatcatcccggccagcaacggacacgaggtggccagacaagcacaaacctctcaggagccctaccacgacaaggccagagaacaccccgatgacggaaagcatccagatggaggcctctacaacaagggaccctcctactcgagttattccgggtacataatgatgccaaatatgaataacgacccatacatgtcaaatggatctctttctccacccatcccgagaacatcaaataaagtgcccgtggtgcagccatcccatgcggtccatcctctcacccccctcatcacttacagtgacgagcacttttctccaggatcacacccgtcacacatcccatcagatgtcaactccaaacaaggcatgtccagacatcctccagctcctgatatccctactttttatcccttgtctccgggtggtgttggacagatcaccccacctcttggctggcaaggtcagcctgtatatcccatcacgggtggattcaggcaaccctacccatcctcactgtcagtcgacacttccatgtccaggttttcccatcatatgattcccggtcctcctggtccccacacaactggcatccctcatccagctattgtaacacctcaggtcaaacaggaacatccccacactgacagtgacctaatgcacgtgaagcctcagcatgaacagagaaaggagcaggagccaaaaagacctcacattaagaagcctctgaatgcttttatgttatacatgaaagaaatgagagcgaatgtcgttgctgagtgtactctaaaagaaagtgcagctatcaaccagattcttggcagaaggtggcatgccctctcccgtgaagagcaggctaaatattatgaattagcacggaaagaaagacagctacatatgcagctttatccaggctggtctgcaagagacaattatggtaagaaaaagaagaggaagagagagaaactacaggaatctgcatcaggtacaggtccaagaatgacagctgcctacatctga

SEQ ID NO: 350 - DNA, 1401 bp, Homo sapiens;
atgacccccatcctcacggtcctgatctgtctcgggctgagtctgggccccaggacccacgtgcaggcagggcacctccccaagcccaccctctgggctgagccaggctctgtgatcatccagggaagtcctgtgaccctcaggtgtcaggggagccttcaggctgaggagtaccatctatatagggaaaacaaatcagcatcctgggttagacggatacaagagcctgggaagaatggccagttccccatcccatccatcacctgggaacacgcagggcggtatcactgtcagtactacagccacaatcactcatcagagtacagtgaccccctggagctggtggtgacaggagcctacagcaaacccaccctctcagctctgcccagccctgtggtgacctcaggagggaacgtgaccctccagtgtgtctcacaggtggcatttgacggcttcattctgtgtaaggaaggagaagatgaacacccacaacgcctgaactcccattcccatgcccgtgggtggtcctgggccatcttctccgtgggccccgtgagcccgagtcgcaggtggtcgtacaggtgctatgcttatgactcgaactctccctatgtgtggtctctacccagtgatctcctggagctcctggtcccaggtgtttctaagaagccatcactctcagtgcagccaggtcctatggtggcccctggggagagcctgaccctccagtgtgtctctgatgtcggctacgacagatttgttctgtataaggagggagaacgtgacttcctccagcgccctggttggcagccccaggctgggctctcccaggccaacttcaccctgggccctgtgagcccctcccacgggggccagtacagatgctacagtgcacacaacctctcctccgagtggtcggcccccagtgaccccctggacatcctgatcacaggacagttctatgacagaccctctctctcggtgcagccggtccccacagtagccccaggaaagaacgtgaccctgctgtgtcagtcacgggggcagttccacactttccttctgaccaaggagggggcaggccatcccccactgcatctgagatcagagcaccaagctcagcagaaccaggctgaattccgcatgggtcctgtgacctcagcccacgtggggacctacagatgctacagctcactcagctccaacccctacctgctgtctctccccagtgaccccctggagctcgtggtctcagcatccctaggccaacacccccaggattacacagtggagaatctcatccgcatgggtgtggctggcttggtcctggtggtcctcgggattctgctatttgaggctcagcacagccagagaagcctacaagatgcagccgggaggtga

SEQ ID NO: 351 - DNA, 1899 bp, Homo sapiens;
atgacgcccgccctcacagccctgctctgccttgggctgagtctgggccccaggacccgcgtgcaggcagggcccttccccaaacccaccctctgggctgagccaggctctgtgatcagctgggggagccccgtgaccatctggtgtcaggggagcctggaggcccaggagtaccaactggataaagagggaagcccagagcccttggacagaaataacccactggaacccaagaacaaggccagattctccatcccatccatgacacagcaccatgcagggagataccgctgccactattacagctctgcaggctggtcagagcccagcgaccccctggagctggtgatgacaggattctacaacaaacccaccctctcagccctgcccagccctgtggtggcctcaggggggaatatgaccctccgatgtggctcacagaagggatatcaccattttgttctgatgaaggaaggagaacaccagctcccccggaccctggactcacagcagctccacagtggggggttccaggccctgttccctgtgggccccgtgacccccagccacaggtggaggttcacatgctattactattatacaaacaccccccgggtgtggtcccaccccagtgaccccctggagattctgccctcaggcgtgtctaggaagccctccctcctgaccctgcagggccctgtcctggcccctgggcagagcctgaccctccagtgtggctctgatgtcggctacgacagatttgttctgtataaggagggggaacgtgacttcctccagcgccctggccagcagccccaggctgggctctcccaggccaacttcaccctgggccctgtgagcccctcccacgggggccagtacaggtgctatggtgcacacaacctctcctccgagtggtcggcccccagcgaccccctgaacatcctgatggcaggacagatctatgacaccgtctccctgtcagcacagccgggccccacagtggcctcaggagagaacgtgaccctgctgtgtcagtcacggggttattttgacactttccttctgaccaaagaaggggcagcccatcccccactgcgtctgagatcaatgtacggagctcataagtaccaggctgaattccccatgagtcctgtgacctcagcccacgcggggacctacaggtgctacggctcatacagctccaacccccacctgctgtctttccccagtgagcccctggaactcatggtctcaggacactctggaggctccagcctcccacccacagggccgccctccacacctggtctgggaagatacctggaggttttgattggggtctcggtggccttcgtcctgctgctcttcctcctcctcttcctcctcctccgacgtcagcgtcacagcaaacacaggacatctgaccagagaaagactgatttccagcgtcctgcaggggctgcggagacagagcccaaggacaggggcctgctgaggaggtccagcccagctgctgacgtccaggaagaaaacctctatgctgccgtgaaggacacacagtctgaggacagggtggagctggacagtcagcagagcccacacgatgaagacccccaggcagtgacgtatgccccggtgaaacactccagtcctaggagagaaatggcctctcctccctcctcactgtctggggaattcctggacacaaaggacagacaggtggaagaggacaggcagatggacactgaggctgctgcatctgaagcctcccaggatgtgacctacgcccagctgcacagcttgacccttagacggaaggcaactgagcctcctccatcccaggaaggggaacctccagctgagcccagcatctacgccactctggccatccactag

SEQ ID NO: 352 - DNA, 1917 bp, Homo sapiens;
atgtccgcgctggcgggtgaagatgtctggaggtgtccaggctgtggggaccacattgctccaagccagatatggtacaggactgtcaacgaaacctggcacggctcttgcttccggtgttcagaatgccaggattccctcaccaactggtactatgagaaggatgggaagctctactgccccaaggactactgggggaagtttggggagttctgtcatgggtgctccctgctgatgacagggccttttatggtggctggggagttcaagtaccacccagagtgctttgcctgtatgagctgcaaggtgatcattgaggatggggatgcatatgcactggtgcagcatgccaccctctactgtgggaagtgccacaatgaggtggtgctggcacccatgtttgagagactctccacagagtctgttcaggagcagctgccctactctgtcacgctcatctccatgccggccaccactgaaggcaggcggggcttctccgtgtccgtggagagtgcctgctccaactacgccaccactgtgcaagtgaaagaggtcaaccggatgcacatcagtcccaacaatcgaaacgccatccaccctggggaccgcatcctggagatcaatgggacccccgtccgcacacttcgagtggaggaggtggaggatgcaattagccagacgagccagacacttcagctgttgattgaacatgaccccgtctcccaacgcctggaccagctgcggctggaggcccggctcgctcctcacatgcagaatgccggacacccccacgccctcagcaccctggacaccaaggagaatctggaggggacactgaggagacgttccctaaggcgcagtaacagtatctccaagtcccctggccccagctccccaaaggagcccctgctgttcagccgtgacatcagccgctcagaatcccttcgttgttccagcagctattcacagcagatcttccggccctgtgacctaatccatggggaggtcctggggaagggcttctttgggcaggctatcaaggtgacacacaaagccacgggcaaagtgatggtcatgaaagagttaattcgatgtgatgaggagacccagaaaacttttctgactgaggtgaaagtgatgcgcagcctggaccaccccaatgtgctcaagttcattggtgtgctgtacaaggataagaagctgaacctcctgacagagtacattgaggggggcacactgaaggactttctgcgcagtatggatccgttcccctggcagcagaaggtcaggtttgccaaaggaatcgcctccggaatggcctatttgcactctatgtgcatcatccaccgggatctgaactcgcacaactgcctcatcaagttggacaagactgtggtggtggcagactttgggctgtcacggctcatagtggaagagaggaaaagggcccccatggagaaggccaccaccaagaaacgcaccttgcgcaagaacgaccgcaagaagcgctacacggtggtgggaaacccctactggatggcccctgagatgctgaacggaaagagctatgatgagacggtggatatcttctcctttgggatcgttctctgtgagatcattgggcaggtgtatgcagatcctgactgccttccccgaacactggactttggcctcaacgtgaagcttttctgggagaagtttgttcccacagattgtcccccggccttcttcccgctggccgccatctgctgcagactggagcctgagagcagaccagcattctcgaaattggaggactcctttgaggccctctccctgtacctgggggagctgggcatcccgctgcctgcagagctggaggagttggaccacactgtgagcatgcagtacggcctgacccgggactcacctccctag

SEQ ID NO: 353 - DNA, 1056 bp, Homo sapiens;
atggtcatcatgggccagtgctactacaacgagaccatcggcttcttctataacaacagtggcaaagagctcagctcccactggcggcccaaggatgtggtcgtggtggcactggggctgaccgtcagcgtgctggtgctgctgaccaatctgctggtcatagcagccatcgcctccaaccgccgcttccaccagcccatctactacctgctcggcaatctggccgcggctgacctcttcgcgggcgtggcctacctcttcctcatgttccacactggtccccgcacagcccgactttcacttgagggctggttcctgcggcagggcttgctggacacaagcctcactgcgtcggtggccacactgctggccatcgccgtggagcggcaccgcagtgtgatggccgtgcagctgcacagccgcctgccccgtggccgcgtggtcatgctcattgtgggcgtgtgggtggctgccctgggcctggggctgctgcctgcccactcctggcactgcctctgtgccctggaccgctgctcacgcatggcacccctgctcagccgctcctatttggccgtctgggctctgtcgagcctgcttgtcttcctgctcatggtggctgtgtacacccgcattttcttctacgtgcggcggcgagtgcagcgcatggcagagcatgtcagctgccacccccgctaccgagagaccacgctcagcctggtcaagactgttgtcatcatcctgggggcgttcgtggtctgctggacaccaggccaggtggtactgctcctggatggtttaggctgtgagtcctgcaatgtcctggctgtagaaaagtacttcctactgttggccgaggccaactccctggtcaatgctgctgtgtactcttgccgagatgctgagatgcgccgcaccttccgccgccttctctgctgcgcgtgcctccgccagtccacccgcgagtctgtccactatacatcctctgcccagggaggtgccagcactcgcatcatgcttcccgagaacggccacccactgatggactccaccctttag

SEQ ID NO: 354 - DNA, 2691 bp, Homo sapiens;; identical to SEQ ID NO: 46

SEQ ID NO: 355 - DNA, 1500 bp, Homo sapiens;
atgaatgatgacccaagtatggaagagaatggtgttgaacgcgtgtgtcctgagagcctgctgcagtccagggaatattcctcactaccattacccagacacacttcatcgacagacggtactataacttcaagtgatcctggattagaaattctgaatatggcttcttgtgaccttgacagaaactcgctctgtaagaaagaggaggatacaagatcagcttctcccacgatagaggcccaaggcacaagtccagctcatgataatattgcattccaagactctacgagtaaggataaaaccatattaaatctggaagccaaagaggaaccagaaacaatagaagaacataaaaaagaacatgcttcaggagactctgtggtttcccctcttcctgtaaccactgtgaaatcggttaaccttagacaaagtgagaacacttctgctaatgagaaggaggtggaggcagaatttctcagattatctttgggatttaagtgtgactggtttaccttggagaagagagtgaagcttgaagagaggtcccgtgacttggcagaagaaaatttgaagaaagaaatcactaactgtttaaaactattagagtctttaacacctctgtgtgaagatgacaaccaggcacaggaaatcattaagaagctggagaagagtataaagtttcttagccagtgtgcagcacgagtggccagtagggctgagatgttgggagccatcaatcaggaaagccgggttagtaaagcagttgaagtgatgattcagcacgtagaaaacttgaagaggatgtatgccaaagagcacgctgaattagaagaactgaaacaggttcttctgcagaatgaaaggtctttcaatcctcttgaagatgatgatgactgccaaattaaaaaacgttcagcttctctaaactccaagccatcttctctacgaagagtgactattgcctctttacccagaaatattggaaatgcaggaatggtggctgggatggaaaataatgatcgattcagtagaaggtcaagcagttggcgtattttggggtcaaagcagagtgaacaccgtccctcattacctcgatttattagcacctattcctgggcagatgctgaagaagaaaaatgtgaactaaaaactaaagatgactcagagccatctggagaagaaacagtagaaaggacaaggaagccaagtctttctgaaaagaaaaataatccatcaaagtgggatgtctcttcagtttatgacacaatagcttcctgggcaacaaatctcaagtcctccatcagaaaggctaataaggccctctggctctctattgcattcattgtactgtttgcagctttgatgagcttcctcacaggccaattattccagaagtctgtggatgccgctcccacacagcaagaggactcatggacgtctctagaacatatcttgtggccatttaccagactccgacacaatgggccaccaccagtgtga

SEQ ID NO: 356 - DNA, 2142 bp, Homo sapiens;
atgctgttggccaccctcctcctcctcctccttggaggcgctctggcccatccagaccggattatttttccaaatcatgcttgtgaggaccccccagcagtgctcttagaagtgcagggcaccttacagaggcccctggtccgggacagccgcacctcccctgccaactgcacctggctcatcctgggcagcaaggaacagactgtcaccatcaggttccagaagctacacctggcctgtggctcagagcgcttaaccctacgctcccctctccagccactgatctccctgtgtgaggcacctcccagccctctgcagctgcccgggggcaacgtcaccatcacttacagctatgctggggccagagcacccatgggccagggcttcctgctctcctacagccaagattggctgatgtgcctgcaggaagagtttcagtgcctgaaccaccgctgtgtatctgctgtccagcgctgtgatggggttgatgcctgtggcgatggctctgatgaagcaggttgcagctcagaccccttccctggcctgaccccaagacccgtcccctccctgccttgcaatgtcaccttggaggacttctatggggtcttctcctctcctggatatacacacctagcctcagtctcccacccccagtcctgccattggctgctggacccccatgatggccggcggctggccgtgcgcttcacagccctggacttgggctttggagatgcagtgcatgtgtatgacggccctgggccccctgagagctcccgactactgcgtagtctcacccacttcagcaatggcaaggctgtcactgtggagacactgtctggccaggctgttgtgtcctaccacacagttgcttggagcaatggtcgtggcttcaatgccacctaccatgtgcggggctattgcttgccttgggacagaccctgtggcttaggctctggcctgggagctggcgaaggcctaggtgagcgctgctacagtgaggcacagcgctgtgacggctcatgggactgtgctgacggcacagatgaggaggactgcccaggctgcccacctggacacttcccctgtggggctgctggcacctctggtgccacagcctgctacctgcctgctgaccgctgcaactaccagactttctgtgctgatggagcagatgagagacgctgtcggcattgccagcctggcaatttccgatgccgggacgagaagtgcgtgtatgagacgtgggtgtgcgatgggcagccagactgtgcggacggcagtgatgagtgggactgctcctatgttctgccccgcaaggtcattacagctgcagtcattggcagcctagtgtgcggcctgctcctggtcatcgccctgggctgcacctgcaagctctatgccattcgcacccaggagtacagcatctttgcccccctctcccggatggaggctgagattgtgcagcagcaggcacccccttcctacgggcagctcattgcccagggtgccatcccacctgtagaagactttcctacagagaatcctaatgataactcagtgctgggcaacctgcgttctctgctacagatcttacgccaggatatgactccaggaggtggcccaggtgcccgccgtcgtcagcggggccgcttgatgcgacgcctggtacgccgtctccgccgctggggcttgctccctcgaaccaacaccccggctcgggcctctgaggccagatcccaggtcacaccttctgctgctccccttgaggccctagatggtggcacaggtccagcccgtgagggcggggcagtgggtgggcaagatggggagcaggcacccccactgcccatcaaggctcccctcccatctgctagcacgtctccagcccccactactgtccctgaagccccagggccactgccctcactgcccctagagccatcactattgtctggagtggtgcaggccctgcgaggccgcctgttgcccagcctggggcccccaggaccaacccggagcccccctggaccccacacagcagtcctggccctggaagatgaggacgatgtgctactggtgccactggctgagccgggggtgtgggtagctgaggcagaggatgagccactgcttacctga

SEQ ID NO: 357 - DNA, 315 bp, Homo sapiens;
atgttatcgcggaatgatgatatatgtatctacgggggcctggggctgggcgggctcctgcttctggcagtggtccttctgtccgcctgcctgtgttggctgcatcgaagagtaaagaggctggagaggagctggcaccttctgtcctggtcccaggcccagggctcctcagagcaggaactccactatgcatctctgcagaggctgccagtgcccagcagtgagggacctgacctcaggggcagagacaagagaggcaccaaggaggatccaagagctgactatgcctgcattgctgagaacaaacccacctga

SEQ ID NO: 358 - DNA, 735 bp, Homo sapiens;
atgggggcactggggctggagggcaggggtgggaggctccaggggaggggttccctcctgctagctgtggcaggagccacttctctggtgaccttgttgctggcggtgcctatcactgtcctggctgtgctggccttagtgccccaggatcagggaggactggtaacggagacggccgaccccggggcacaggcccagcaaggactggggtttcagaagctgccagaggaggagccagaaacagatctcagccccgggctcccagctgcccacctcataggcgctccgctgaaggggcaggggctaggctgggagacgacgaaggaacaggcgtttctgacgagcgggacgcagttctcggacgccgaggggctggcgctcccgcaggacggcctctattacctctactgtctcgtcggctaccggggccgggcgccccctggcggcggggacccccagggccgctcggtcacgctgcgcagctctctgtaccgggcggggggcgcctacgggccgggcactcccgagctgctgctcgagggcgccgagacggtgactccagtgctggacccggccaggagacaagggtacgggcctctctggtacacgagcgtggggttcggcggcctggtgcagctccggaggggcgagagggtgtacgtcaacatcagtcaccccgatatggtggacttcgcgagagggaagaccttctttggggccgtgatggtggggtga

SEQ ID NO: 359 - DNA, 843 bp, Homo sapiens;
atgtgcccgcctcaggcacaggcagaggtgggccccaccatgactgagaaggcagagatggtgtgtgcccccagcccagcgcctgccccaccccctaagcctgcctcgcctgggcccccgcaggtggaggaggtgggccaccgaggaggctcctcgccccccaggctgccacctggtgtaccagtgatcagcctgggccacagcaggcccccaggggtagccatgcccaccacagagctgggcactctgcggcccccgctgctgcaactctccaccctgggaactgccccgcccactttggccctgcactaccaccctcaccccttcctcaacagtgtctacattgggccagcaggaccttttagcatcttccctagcagccggttgaagcggagaccaagccactgtgagctggacctggctgaggggcaccagccccagaaggtggcccggcgcgtgttcaccaacagccgggagcgctggcggcagcagaacgttaacggcgccttcgccgagctgaggaagctgctgccgacgcacccgcccgaccggaagctgagcaagaacgaggtgctccgcctagccatgaagtacatcggcttcctggtgcggctgctgcgcgaccaagccgcagctctggccgcaggccccacccctcccgggcctcgcaaacggccggtgcaccgggtcccagacgacggcgcccgccggggatccggacgcagggccgaggcggcagcgcgctcgcagcccgcgcccccggccgaccccgacggcagccccggtggagcggcccggcccatcaagatggagcaaaccgctttgagcccagaggtgcggtga

SEQ ID NO: 360 - DNA, 1539 bp, Homo sapiens;
atgggatgtataaaatcaaaagggaaagacagcttgagtgacgatggagtagatttgaagactcaaccagtacgtaatactgaaagaactatttatgtgagagatccaacgtccaataaacagcaaaggccagttccagaatctcagcttttacctggacagaggtttcaaactaaagatccagaggaacaaggagacattgtggtagccttgtacccctatgatggcatccacccggacgacttgtctttcaagaaaggagagaagatgaaagtcctggaggagcatggagaatggtggaaagcaaagtcccttttaacaaaaaaagaaggcttcatccccagcaactatgtggccaaactcaacaccttagaaacagaagagtggtttttcaaggatataaccaggaaggacgcagaaaggcagcttttggcaccaggaaatagcgctggagctttccttattagagaaagtgaaacattaaaaggaagcttctctctgtctgtcagagactttgaccctgtgcatggtgatgttattaagcactacaaaattagaagtctggataatgggggctattacatctctccacgaatcacttttccctgtatcagcgacatgattaaacattaccaaaagcaggcagatggcttgtgcagaagattggagaaggcttgtattagtcccaagccacagaagccatgggataaagatgcctgggagatcccccgggagtccatcaagttggtgaaaaggcttggcgctgggcagtttggggaagtctggatgggttactataacaacagtaccaaggtggctgtgaaaaccctgaagccaggaactatgtctgtgcaagccttcctggaagaagccaacctcatgaagaccctgcagcatgacaagctcgtgaggctctacgctgtggtcaccagggaggagcccatttacatcatcaccgagtacatggccaagggcagtttgctggatttcctgaagagcgatgaaggtggcaaagtgctgcttccaaagctcattgacttttctgctcagattgcagagggaatggcatacatcgagcggaagaactacattcaccgggacctgcgagcagctaatgttctggtctccgagtcactcatgtgcaaaattgcagattttggccttgctagagtaattgaagataatgagtacacagcaagggaaggtgctaagttccctattaagtggacggctccagaagcaatcaactttggatgtttcactattaagtctgatgtgtggtcctttggaatcctcctatacgaaattgtcacctatgggaaaattccctacccagggagaactaatgccgacgtgatgaccgccctgtcccagggctacaggatgccccgtgtggagaactgcccagatgagctctatgacattatgaaaatgtgctggaaagaaaaggcagaagagagaccaacgtttgactacttacagagcgtcctggatgatttctacacagccacggaagggcaataccagcagcagccttag

SEQ ID NO: 361 - DNA, 11406 bp, Homo sapiens;
atgagcaccgacagtaactcactggcacgtgaatttctgaccgatgtcaaccggctttgcaatgcagtggtccagagggtggaggccagggaggaagaagaggaggagacgcacatggcaacccttggacagtaccttgtccatggtcgaggatttctattacttaccaagctaaattctataattgatcaggcattgacatgtagagaagaactcctgactcttcttctgtctctccttccactggtatggaagatacctgtccaagaagaaaaggcaacagattttaacctaccgctctcagcagatataatcctgaccaaagaaaagaactcaagttcacaaagatccactcaggaaaaattacatttagaaggaagtgccctgtctagtcaggtttctgcaaaagtaaatgtttttcgaaaaagcagacgacagcgtaaaattacccatcgctattctgtaagagatgcaagaaagacacagctctccacctcagattcagaagccaattcagatgaaaaaggcatagcaatgaataagcatagaaggccccatctgctgcatcattttttaacatcgtttcctaaacaagaccaccccaaagctaaacttgaccgcttagcaaccaaagaacagactcctccagatgctatggctttggaaaattccagagagattattccaagacaggggtcaaacactgacattttaagtgagccagctgccttgtctgttatcagtaacatgaacaattctccatttgacttatgtcatgttttgttatctttattagaaaaagtttgtaagtttgacgttaccttgaatcataattctcctttagcagccagtgtagtgcccacactaactgaattcctagcaggctttggggactgctgcagtctgagcgacaacttggagagtcgagtagtttctgcaggttggaccgaagaaccggtggctttgattcaaaggatgctctttcgaacagtgttgcatcttctgtcagtagatgttagtactgcagagatgatgccagaaaatcttaggaaaaatttaactgaattgcttagagcagctttaaaaattagaatatgcctagaaaagcagcctgacccttttgcaccaagacaaaagaaaacactgcaggaggttcaggaagattttgtgttttcaaagtatcgtcatagagcccttcttttacctgagcttttggaaggagttcttcagattctgatctgttgtcttcaaagtgcagcttcaaatcccttctacttcagtcaagccatggatttggttcaagaattcattcagcatcatggatttaatttatttgaaacagcagttcttcaaatggaatggctggttttaagagatggagttcctcccgaggcctcagagcatttgaaagccctaataaatagtgtgatgaaaataatgagcactgtcaaaaaagtgaaatcagagcaacttcatcattcgatgtgtacaagaaaaaggcacagacgatgtgaatattctcattttatgcatcatcaccgagatctctcaggtcttctggtttcggcttttaaaaaccaggtttccaaaaacccatttgaagagactgcagatggagatgtttattatcctgagcggtgctgttgcattgcagtgtgtgcccatcagtgcttgcgcttactacagcaggcttccttgagcagcacttgtgtccagatcctatcgggtgttcataacattggaatatgctgttgtatggatcccaaatctgtaatcattcctttgctccatgcttttaaattgccagcactgaaaaattttcagcagcatatattgaatatccttaacaaacttattttggatcagttaggaggagcagagatatcaccaaaaattaaaaaagcagcttgtaatatttgtactgttgactctgaccaactagcccaattagaagagacactgcagggaaacttatgtgatgctgaactctcctcaagtttatccagtccttcttacagatttcaagggatcctgcccagcagtggatctgaagatttgttgtggaaatgggatgctttaaaggcttatcagaactttgtttttgaagaagacagattacatagtatacagattgcaaatcacatttgcaatttaatccagaaaggcaatatagttgttcagtggaaattatataattacatatttaatcctgtgctccaaagaggagttgaattagcacatcattgtcaacacctaagcgttacttcagctcaaagtcatgtatgtagccatcataaccagtgcttgcctcaggacgtgcttcagatttatgtaaaaactctgcctatcctgcttaaatccagggtaataagagatttgtttttgagttgtaatggagtaagtcaaataatcgaattaaattgcttaaatggtattcgaagtcattctctaaaagcatttgaaactctgataatcagcctaggggagcaacagaaagatgcctcagttccagatattgatgggatagacattgaacagaaggagttgtcctctgtacatgtgggtacttcttttcatcatcagcaagcttattcagattctcctcagagtctcagcaaattttatgctggcctcaaagaagcttatccaaagagacggaagactgttaaccaagatgttcatatcaacacaataaacctattcctctgtgtggcttttttatgcgtaagtaaagaagcagagtctgacagggagtcggccaatgactcagaagatacttctggctatgacagcacagccagcgagcctttaagtcatatgctgccatgtatatctctcgagagccttgtcttgccttctcctgaacatatgcaccaagcagcagacatttggtctatgtgtcgttggatctacatgttgagttcagtgttccagaaacagttttataggcttggtggtttccgagtatgccataagttaatatttatgataatacagaaactgttcagaagtcacaaagaggagcaaggaaaaaaggagggagatacaagtgtaaatgaaaaccaggatttaaacagaatttctcaacctaagagaactatgaaggaagatttattatctttggctataaaaagtgaccccataccatcagaactaggtagtctaaaaaagagtgctgacagtttaggtaaattagagttacagcatatttcttccataaatgtggaagaagtttcagctactgaagccgctcccgaggaagcaaagctatttacaagtcaagaaagtgagacctcacttcaaagtatacgacttttggaagcccttctggccatttgtcttcatggtgccagaactagtcaacagaagatggaattggagttacctaatcagaacttgtctgtggaaagtatattatttgaaatgagggaccatctttcccagtcaaaggtgattgaaacacaactagcaaagcctttatttgatgccctgcttcgagttgccctcgggaattattcagcagattttgaacataatgatgctatgactgagaagagtcatcaatctgcagaagaattgtcatcccagcctggtgatttttcagaagaagctgaggattctcagtgttgtagttttaaacttttagttgaagaagaaggttacgaagcagatagtgaaagcaatcctgaagatggcgaaacccaggatgatggggtagacttaaagtctgaaacagaaggtttcagtgcatcaagcagtccaaatgacttactcgaaaacctcactcaaggggaaataatttatcctgagatttgtatgctggaattaaatttgctttctgctagtaaagccaaacttgatgtgcttgcccatgtatttgagagttttttgaaaattattaggcagaaagaaaagaatgtttttctgctcatgcaacagggaactgtgaaaaatcttttaggagggttcttgagtattttaacacaggatgattctgattttcaagcatgccagagagtattggtggatcttttggtatctttgatgagttcaagaacatgttcagaagagctaacccttcttttgagaatatttctggagaaatctccttgtacaaaaattcttcttctgggtattctgaaaattattgaaagtgatactactatgagcccttcacagtatctaaccttccctttactgcacgctccaaatttaagcaacggtgtttcatcacaaaagtatcctgggattttaaacagtaaggccatgggtttattgagaagagcacgagtttcacggagcaagaaagaggctgatagagagagttttccccatcggctgctttcatcttggcacatagccccagtccacctgccgttgctggggcaaaactgctggccacacctatcagaaggtttcagtgtttccctgtggtttaatgtggagtgtatccatgaagctgagagtactacagaaaaaggaaagaagataaagaaaagaaacaaatcattaattttaccagatagcagttttgatggtacagagagcgacagaccagaaggtgcagagtacataaatcctggtgaaagactcatagaagaaggatgtattcatataatttcactgggatccaaagcgttgatgatccaagtgtgggctgatccccacaatgccactcttatctttcgtgtgtgcatggattcaaatgatgacatgaaagctgttttactagcacaggttgaatcacaggagaatattttcctcccaagcaaatggcaacatttagtactcacctacttacagcagccccaagggaaaaggaggattcatgggaaaatctccatatgggtctctggacagaggaagcctgatgttactttggattttatgcttccaagaaaaacaagtttgtcatctgatagcaataaaacattttgcatgattggccattgtttatcatcccaagaagagtttttgcagttggctggaaaatgggacctgggaaatttgcttctcttcaacggagctaaggttggttcacaagaggccttttatctgtatgcttgtggacccaaccatacatctgtaatgccatgtaagtatggcaagccagtcaatgactactccaaatatattaataaagaaattttgcgatgtgaacaaatcagagaactttttatgaccaagaaagatgtggatattggtctcttaattgaaagtctttcagttgtttatacaacttactgtcctgctcagtataccatctatgaaccagtgattagacttaaaggtcaaatgaaaacccaactctctcaaagacccttcagctcaaaagaagttcagagcatcttattagaacctcatcatctaaagaatctccaacctactgaatataaaactattcaaggcattctgcacgaaattggtggaactggcatatttgtttttctctttgccagggttgttgaactcagtagctgtgaagaaactcaagcattagcactgcgagttatactctcattaattaaatacaaccaacaaagagtacatgaattagaaaattgtaatggactttctatgattcatcaggtgttgatcaaacaaaaatgcattgttgggttttacattttgaagacccttcttgaaggatgctgtggtgaagatattatttatatgaatgagaatggagagtttaagttggatgtagactctaatgctataatccaagatgttaagctgttagaggaactattgcttgactggaagatatggagtaaagcagagcaaggtgtttgggaaactttgctagcagctctagaagtcctcatcagagcagatcaccaccagcagatgtttaatattaagcagttattgaaagctcaagtggttcatcactttctactgacttgtcaggttttgcaggaatacaaagaggggcaactcacacccatgccccgagaggtttgtagatcatttgtgaaaattatagcagaagtccttggatctcctccagatttggaattattgacaattatcttcaatttccttttagcagttcaccctcctactaatacttacgtttgtcacaatcccacgaacttctacttttctttgcacatagatggcaagatctttcaggagaaagtgcggtcaatcatgtacctgaggcattccagcagtggaggaaggtcccttatgagccctggatttatggtaataagcccatctggttttactgcttcaccatatgaaggagagaattcctctaatattattccacaacagatggccgcccatatgctgcgttctagaagcctaccagcattccctacttcttcactactaacgcaatcacaaaaactgactggaagtttgggttgtagtatcgacaggttacaaaatattgcagatacttatgttgccacccaatcaaagaaacaaaattctttggggagttccgacacactgaaaaaaggcaaagaggacgcattcatcagtagctgtgagtctgcaaaaactgtttgtgaaatggaagctgtcctctcagcccaggtctctgtcagtgatgtcccaaagggagtgctgggatttccagtggtcaaagcagatcataaacagttgggagcagaacccaggtcagaagatgacagtcctggggatgagtcctgcccacgccgacctgattacctaaagggattggcctccttccagcgaagccacagcactattgcaagccttgggctagcttttccttcacagaacggatctgcagctgttggccgttggccaagtcttgttgatagaaacactgatgattgggaaaactttgcctattctcttggttatgagccaaattacaaccgaactgcaagtgctcacagtgtaactgaagactgtttggtacctatatgctgtggattatatgaactcctaagtggggttcttcttatcctgcctgatgttttgcttgaagatgtgatggacaagcttattcaagcagatacacttttggtcctcgttaaccacccatcaccagctatacaacaaggtgttattaaactattagatgcatattttgctagagcatctaaggaacaaaaagataaatttctgaagaatcgtggattttccttgctagccaaccagttgtatcttcatcgaggaactcaagaattgttagaatgcttcatcgaaatgttctttggtcgacatattggccttgatgaagaatttgatctggaagatgtgagaaacatgggattgtttcagaagtggtctgtcattcctattctgggactaatagagacctctctatatgacaacatactcttgcataatgctcttttacttcttctccaaattttaaattcttgttctaaggtagcagatatgttgctggataatggtctactctatgtgttatgtaatacagtagcagccctgaatggattagaaaagaacattcccatgagtgaatataaattgcttgcttgtgatatacagcaacttttcatagcagttacaattcatgcttgcagttcctcaggctcacaatattttagggttattgaagaccttattgtaatgcttggatatcttcaaaatagcaaaaacaagaggacacaaaatatggctgttgcactacagcttagagttctccaggctgctatggaatttataaggaccaccgcaaatcatgactctgaaaacctcacagattcactccagtcaccttctgctccccatcatgcagtagttcaaaagcggaaaagcattgctggtcctcgaaaatttccccttgctcaaactgaatcgcttctgatgaaaatgcgttcagtggcaaatgatgagcttcatgtgatgatgcaacggagaatgagccaagagaaccctagccaagcaactgaaacggaacttgcgcagagactacagaggctcactgttttagcagtcaacaggattatttatcaagaatttaattcagacattattgacattttgagaactccagaaaatgtaactcaaagcaagacctcagttttccagaccgaaatttctgaggaaaatattcatcatgaacagtcttctgttttcaatccatttcagaaagaaatttttacatatctggtagaaggattcaaagtatctattggttcaagtaaagccagtggttccaagcagcaatggactaaaattctgtggtcttgtaaggagaccttccgaatgcagcttgggagactactagtgcatattttgtcgccagcccacgctgcacaagagagaaagcaaatttttgaaatagttcatgaaccaaatcatcaggaaatactacgagactgtctcagcccatccctacaacatggagccaagttagttttgtatttgtcagagttgatacataatcaccaaggtgaattgactgaagaagagctaggcacagcagaactgcttatgaatgctttgaagttatgtggtcacaagtgcatccctcccagtgcatcaacaaaagcagaccttattaaaatgatcaaagaggaacaaaagaaatatgaaactgaagaaggagtgaataaagctgcttggcagaaaacagttaacaataatcaacaaagtctctttcagcgtctggattcaaaatcaaaggatatatctaaaatagctgcagatatcacccaggcagtgtctctctcccaaggaaatgagagaaaaaaggtgatccagcatattagaggaatgtataaagtagatttgagtgccagcagacattggcaggaacttattcagcagctgacacatgatagagcagtatggtatgaccccatctactatccaacctcatggcagttggatccaacagaagggccaaatcgagagaggagacgtttacagagatgttatttaactattccaaataagtatctccttagggatagacagaaatcagaagatgttgtcaaaccaccactctcttacctgtttgaagacaaaactcattcttctttctcttctactgtcaaagacaaagctgcaagtgaatctataagagtgaatcgaagatgcatcagtgttgcaccatctagagagacagctggtgaattgttactaggtaaatgtggaatgtattttgtggaagataatgcttctgatacagttgaaagttcgagccttcagggagagttggaaccagcatcattttcctggacatatgaagaaattaaagaagttcacaagcgttggtggcaattgagagataatgctgtagaaatctttctaacaaatggcagaacactcctgttggcatttgataacaccaaggttcgtgatgatgtataccacaatatactcacaaataacctccctaatcttctggaatatggtaacatcaccgctctgacaaatttatggtatactgggcaaattactaattttgaatatttgactcacttaaacaaacatgctggccgatccttcaatgatctcatgcagtatcctgtgttcccatttatacttgctgactacgttagtgagacacttgacctcaatgatctgttgatatacagaaatctctctaaacctatagctgttcagtataaagaaaaagaagatcgttatgtggacacatacaagtacttggaggaagagtaccgcaaaggagccagagaagatgaccccatgcctcccgtgcagccctatcactatggctcccactattccaatagcggcactgtgcttcacttcctggtcaggatgcctcctttcactaaaatgtttttagcctatcaagatcaaagttttgacattccagacagaacttttcattctacaaatacaacttggcgactctcatcttttgaatctatgactgatgtgaaagaacttatcccagagtttttctatcttccagagttcctagttaaccgtgaaggttttgattttggtgtgcgtcagaatggtgaacgggttaatcacgtcaaccttcccccttgggcgcgtaatgatcctcgtctttttatcctcatccatcggcaggctctagagtctgactacgtgtcgcagaacatctgtcagtggattgacttggtgtttgggtataagcaaaaggggaaggcttctgttcaagcgatcaatgtttttcatcctgctacatattttggaatggatgtctctgcagttgaagatccagttcagagacgagcgctagaaaccatgataaaaacctacgggcagactccccgtcagctgttccacatggcccatgtgagcagacctggagccaagctcaatattgaaggagagcttccagctgctgtggggttgctagtgcagtttgctttcagggagacccgagaacaggtcaaagaaatcacctatccgagtcctttgtcatggataaaaggcttgaaatggggggaatacgtgggttcccccagtgctccagtacctgtggtctgcttcagccagccccacggagaaagatttggctctctccaggctctgcccaccagagcaatctgtggtttgtcacggaatttctgtcttctgatgacatatagcaaggaacaaggtgtgagaagcatgaacagtacggacattcagtggtcagccatcctgagctggggatatgctgataatattttaaggttgaagagtaaacaaagtgagcctccagtaaactttattcaaagttcacaacagtaccaggtgactagttgtgcttgggtgcctgacagttgccagctgtttactggaagcaaatgcggtgtcatcacagcctacacaaacagatttacaagcagcacgccatcagaaatagaaatggagactcaaatacatctctatggtcacacagaagagataaccagcttatttgtttgcaaaccatacagtatactgataagtgtgagcagagacggaacctgcatcatatgggatttaaacaggttatgctatgtacaaagtctggcgggacacaaaagccctgtcacagctgtctctgccagtgaaacctcaggtgatattgctactgtgtgtgattcagctggcggaggcagtgacctcagactctggacggtgaacggggatctcgttggacatgtccactgcagggagatcatctgttccgtggctttctccaaccagcctgagggagtatctatcaatgtaatcgctgggggattagaaaatggaattgtaaggttatggagcacatgggacttaaagcctgtgagagaaattacatttcccaaatcaaataagcccatcatcagccttacattttcttgtgatggccaccatttgtacacagcaaacagtgatgggaccgtgattgcctggtgtcggaaggaccagcagcgcttgaaacagccaatgttctattccttccttagcagctatgcagccgggtga

SEQ ID NO: 362 - DNA, 3051 bp, Homo sapiens;
atggtgctgcccacctgccccatggcggagttcgcgctgccgcggcacagcgcggtcatggagcgccttcgccggcgcatcgagctgtgccggcgccaccacagcacctgcgaggcccgctacgaggccgtgtcgcccgagcgcctggagctggagcgccaacacaccttcgccctgcaccagcgctgcatccaggccaaggccaagcgcgccgggaagcacaggcagccgcccgccgccacggccccggcgcccgccgccccggccccgcgcctggacgccgctgacggccccgagcacggccgcccggccacgcatcttcatgatacagttaagaggaatcttgacagcgccacttcccctcagaatggcgatcaacagaatggctacggggacctctttcctgggcataagaagactcgccgggaggcccctctgggagttgccatctcttccaatggactgcctccagcctcccccctcggtcagtctgacaagccttctggagccgacgccctgcagtccagtgggaagcactctctggggctagactctctcaacaaaaagcgtctggctgactccagccttcacttgaatggaggcagtaaccccagtgagtcatttcctctgagcctgaataaagaactgaagcaggagcctgtcgaagacctgccttgcatgatcactgggactgtcggctccatatcgcaaagcaacctcatgccagacctcaaccttaacgagcaggagtggaaggagctcatcgaggagctgaacaggtcggtgcccgatgaagacatgaaggacctgtttaatgaggacttcgaggagaagaaggacccagagtcttctggctctgccacacaaacccccttggcacaggacattaatattaagacggaattctctccagcagcctttgagcaagaacagttaggctctccacaagtgagggccgggtctgcagggcagacctttctggggccttcctctgcccctgtgagtacagattcccccagcctagggggctcccaaaccttattccacacctctggtcagccccgggcggacaatcccagtccaaacctgatgccggcatcagcccaggcccagaacgcacaaagagcccttgcaggtgtggtattgcccagtcagggcccaggaggggcctcagagctgtcctctgcccaccagctccagcagatcgctgccaagcagaagcgcgagcagatgctccagaacccacagcaggccaccccggcaccagccccgggccagatgtccacatggcagcagacggggccctcccacagttccttagatgtcccttaccccatggagaagcctgccagcccttccagctacaagcaagacttcactaactccaaactgctcatgatgcctagtgtgaataagagttcccctcggcccggaggcccctacctccagcccagccatgtgaacctgctgagtcaccagccaccgagtaacttgaatcagaactccgcgaataaccaggggtctgtgctggactacggcaatacaaaacccctttctcattacaaagcggactgtgggcaaggcagcccggggtctggccagagcaagccagccctgatggcttatcttccccagcagctgtcccatataagtcacgagcagaactccctgtttctgatgaagccaaagccaggaaatatgcctttccgatcactggttccacctggccaggagcagaacccttccagtgtccctgtgcaagcccaggctaccagtgttgggacccagccgcctgccgtgtccgtggccagctcccacaacagctccccctatctcagcagccagcaacaggccgctgtaatgaagcagcatcagttgcttttggaccaacagaaacaaagggagcagcagcaaaagcatttacagcaacagcagttccttcagaggcaacagcaccttctcgcggaacaggagaagcaacagtttcagcgccatctgacccgcccaccaccccagtaccaagacccgacacaaggcagcttcccacagcaggttggacagttcacagggtcctctgctgccgtgcccggcatgaacaccttgggtccatccaactccagctgtcctcgagtgttccctcaggctgggaatctgatgccaatgggccctggacatgcttcagtttcctctctccccacaaactcaggccaacaggaccggggtgtggctcagttccctggctcccaaaacatgcctcagagcagcctctatggcatggcttctggcataacccagatagttgcccagcccccgccacaggccaccaatggacatgcccacattccacggcagaccaacgtgggccagaacacctccgtctcagctgcctatgggcagaactctctgggaagctctggcctctcccagcagcacaataaggggaccctgaaccctggtttaacaaagccaccggtcccaagggtgtcaccagccatgggaggccagaattcctcctggcagcatcagggaatgccgaacctcagtggccagaccccagggaacagcaacgtgagtcccttcactgcagcctccagtttccacatgcagcagcaggcccacctgaaaatgtctagcccgcaattctcccaggcagtgcccaacaggcccatggctcccatgagctcagcagctgccgtggggtccttgctacccccagtgagtgcacagcagaggaccagcgcccctgccccagcaccacccccaacagcccctcagcagggcttgcctggcctgagcccagcagggcctgagctgggggccttcagccagagccctgcctcacagatgggcggtcgggcggggctgcactgcacccaggcctaccctgtgcggaccgcgggccaggagctgccttttgcctatagcgggcagccaggtggcagtgggctctctagtgtggctggacacaccgatctgatcgactccctgctgaagaacaggacttcagaggagtggatgagtgatttggacgacctgttagggtctcagtaa

SEQ ID NO: 363 - DNA, 1296 bp, Homo sapiens;
atgttcttcgggggagaagggagcttgacttacactttggtaataatttgcttcctgacactaaggctgtctgctagtcagaattgcctcaaaaagagtctagaagatgttgtcattgacatccagtcatctctttctaagggaatcagaggcaatgagcccgtatatacttcaactcaagaagactgcattaattcttgctgttcaacaaaaaacatatcaggggacaaagcatgtaacttgatgatcttcgacactcgaaaaacagctagacaacccaactgctacctatttttctgtcccaacgaggaagcctgtccattgaaaccagcaaaaggacttatgagttacaggataattacagattttccatctttgaccagaaatttgccaagccaagagttaccccaggaagattctctcttacatggccaattttcacaagcagtcactcccctagcccatcatcacacagattattcaaagcccaccgatatctcatggagagacacactttctcagaagtttggatcctcagatcacttggagaaactatttaagatggatgaagcaagtgcccagctccttgcttataaggaaaaaggccattctcagagttcacaattttcctctgatcaagaaatagctcatctgctgcctgaaaatgtgagtgcgctcccagctacggtggcagttgcttctccacataccacctcggctactccaaagcccgccacccttctacccaccaatgcttcagtgacaccttctgggacttcccagccacagctggccaccacagctccacctgtaaccactgtcacttctcagcctcccacgaccctcatttctacagtttttacacgggctgcggctacactccaagcaatggctacaacagcagttctgactaccacctttcaggcacctacggactcgaaaggcagcttagaaaccataccgtttacagaaatctccaacctaactttgaacacagggaatgtgtataaccctactgcactttctatgtcaaatgtggagtcttccactatgaataaaactgcttcctgggaaggtagggaggccagtccaggcagttcctcccagggcagtgttccagaaaatcagtacggccttccatttgaaaaatggcttcttatcgggtccctgctctttggtgtcctgttcctggtgataggcctcgtcctcctgggtagaatcctctcggaatcactccgcaggaaacgttactcaagactggattatttgatcaatgggatctatgtggacatctaa

SEQ ID NO: 364 - DNA, 378 bp, Homo sapiens;
atgccgtcggagaagaccttcaagcagcgccgcaccttcgaacaaagagtagaagatgtccgacttattcgagagcagcatccaaccaaaatcccggtgataatagaacgatacaagggtgagaagcagcttcctgttctggataaaacaaagttccttgtacctgaccatgtcaacatgagtgagctcatcaagataattagaaggcgcttacagctcaatgctaatcaggccttcttcctgttggtgaacggacacagcatggtcagcgtctccacaccaatctcagaggtgtatgagagtgagaaagatgaagatggattcctgtacatggtctatgcctcccaggagacgttcgggatgaaattgtcagtgtaa

SEQ ID NO: 365 - DNA, 2544 bp, Homo sapiens;
atggagcccttgaagagcctcttcctcaagagccctctagggtcatggaatggcagtggcagcgggggtggtgggggcggtggaggaggccggcctgaggggtctccaaaggcagcgggttatgccaacccggtgtggacagccctgttcgactacgagcccagtgggcaggatgagctggccctgaggaagggtgaccgtgtggaggtgctgtcccgggacgcagccatctcaggagacgagggctggtgggcgggccaggtgggtggccaggtgggcatcttcccgtccaactatgtgtctcggggtggcggcccgcccccctgcgaggtggccagcttccaggagctgcggctggaggaggtgatcggcattggaggctttggcaaggtgtacaggggcagctggcgaggtgagctggtggctgtgaaggcagctcgccaggaccccgatgaggacatcagtgtgacagccgagagcgttcgccaggaggcccggctcttcgccatgctggcacaccccaacatcattgccctcaaggctgtgtgcctggaggagcccaacctgtgcctggtgatggagtatgcagccggtgggcccctcagccgagctctggccgggcggcgcgtgcctccccatgtgctggtcaactgggctgtgcagattgcccgtgggatgcactacctgcactgcgaggccctggtgcccgtcatccaccgtgatctcaagtccaacaacattttgctgctgcagcccattgagagtgacgacatggagcacaagaccctgaagatcaccgactttggcctggcccgagagtggcacaaaaccacacaaatgagtgccgcgggcacctacgcctggatggctcctgaggttatcaaggcctccaccttctctaagggcagtgacgtctggagttttggggtgctgctgtgggaactgctgaccggggaggtgccataccgtggcattgactgccttgctgtggcctatggcgtagctgttaacaagctcacactgcccatcccatccacctgccccgagcccttcgcacagcttatggccgactgctgggcgcaggacccccaccgcaggcccgacttcgcctccatcctgcagcagttggaggcgctggaggcacaggtcctacgggaaatgccgcgggactccttccattccatgcaggaaggctggaagcgcgagatccagggtctcttcgacgagctgcgagccaaggaaaaggaactactgagccgcgaggaggagctgacgcgagcggcgcgcgagcagcggtcacaggcggagcagctgcggcggcgcgagcacctgctggcccagtgggagctagaggtgttcgagcgcgagctgacgctgctgctgcagcaggtggaccgcgagcgaccgcacgtgcgccgccgccgcgggacattcaagcgcagcaagctccgggcgcgcgacggcggcgagcgtatcagcatgccactcgacttcaagcaccgcatcaccgtgcaggcctcacccggccttgaccggaggagaaacgtcttcgaggtcgggcctggggattcgcccacctttccccggttccgagccatccagttggagcctgcagagccaggccaggcatggggccgccagtccccccgacgtctggaggactcaagcaatggagagcggcgagcatgctgggcttggggtcccagttcccccaagcctggggaagcccagaatgggaggagaaggtcccgcatggacgaagccacatggtacctggattcagatgactcatcccccttaggatctccttccacacccccagcactcaatggtaaccccccgcggcctagcctggagcccgaggagcccaagaggcctgtccccgcagagcgcggtagcagctctgggacgcccaagctgatccagcgggcgctgctgcgcggcaccgccctgctcgcctcgctgggccttggccgcgacctgcagccgccgggaggcccaggacgcgagcgcggggagtccccgacaacaccccccacgccaacgcccgcgccctgcccgaccgagccgcccccttccccgctcatctgcttctcgctcaagacgcccgactccccgcccactcctgcacccctgttgctggacctgggtatccctgtgggccagcggtcagccaagagcccccgacgtgaggaggagccccgcggaggcactgtctcacccccaccggggacatcacgctctgctcctggcaccccaggcaccccacgttcaccacccctgggcctcatcagccgacctcggccctcgccccttcgcagccgcattgatccctggagctttgtgtcagctgggccacggccttctcccctgccatcaccacagcctgcaccccgccgagcaccctggaccttgttcccggactcagaccccttctgggactccccacctgccaaccccttccaggggggcccccaggactgcagggcacagaccaaagacatgggtgcccaggccccgtgggtgccggaagcggggccttga

SEQ ID NO: 366 - DNA, 1881 bp, Homo sapiens;
atggacgaacaggaggcattgaactcaatcatgaacgatctggtggccctccagatgaaccgacgtcaccggatgcctggatatgagaccatgaagaacaaagacacaggtcactcaaataggcagagtgacgtcagaatcaagttcgagcacaacggggagaggcgaattatagcgttcagccggcctgtgaaatatgaagatgtggagcacaaggtgacaacagtatttggacaacctcttgatctacattacatgaacaatgagctctccatcctgctgaaaaaccaagatgatcttgataaagcaattgacattttagatagaagctcaagcatgaaaagccttaggatattgctgttgtcccaggacagaaaccataacagttcctctccccactctggggtgtccagacaggtgcggatcaaggcttcccagtccgcaggggatataaatactatctaccagccccccgagcccagaagcaggcacctctctgtcagctcccagaaccctggccgaagctcacctccccctggctatgttcctgagcggcagcagcacattgcccggcaggggtcctacaccagcatcaacagtgagggggagttcatcccagagaccagcgagcagtgcatgctggatcccctgagcagtgcagaaaattccttgtctggaagctgccaatccttggacaggtcagcagacagcccatccttccggaaatcacgaatgtcccgtgcccagagcttccctgacaacagacaggaatactcagatcgggaaactcagctttatgacaaaggggtcaaaggtggaacctacccccggcgctaccacgtgtctgtgcaccacaaggactacagtgatggcagaagaacatttccccgaatacggcgtcatcaaggcaacttgttcaccctggtgccctccagccgctccctgagcacaaatggcgagaacatgggtctggctgtgcaatacctggacccccgtgggcgcctgcggagtgcggacagcgagaatgccctctctgtgcaggagaggaatgtgccaaccaagtctcccagtgcccccatcaactggcgccggggaaagctcctgggccagggtgccttcggcagggtctatttgtgctatgacgtggacacgggacgtgaacttgcttccaagcaggtccaatttgatccagacagtcctgagacaagcaaggaggtgagtgctctggagtgcgagatccagttgctaaagaacttgcagcatgagcgcatcgtgcagtactatggctgtctgcgggaccgcgctgagaagaccctgaccatcttcatggagtacatgccagggggctcggtgaaagaccagttgaaggcttacggtgctctgacagagagcgtgacccgaaagtacacgcggcagatcctggagggcatgtcctacctgcacagcaacatgattgttcaccgggacattaagggagccaacatcctccgagactctgctgggaatgtaaagctgggggactttggggccagcaaacgcctgcagacgatctgtatgtcggggacgggcatgcgctccgtcactggcacaccctactggatgagccctgaggtgatcagcggcgagggctatggaaggaaagcagacgtgtggagcctgggctgcactgtggtggagatgctgacagagaaaccaccgtgggcagagtatgaagctatggccgccatcttcaagattgccacccagcccaccaatcctcagctgccctcccacatctctgaacatggccgggacttcctgaggcgcatttttgtggaggctcgccagagaccttcagctgaggagctgctcacacaccactttgcacagctcatgtactga

SEQ ID NO: 367 - DNA, 4125 bp, Homo sapiens;
atgagcacggaggcggacgagggcatcactttctctgtgccacccttcgccccctcgggcttctgcaccatccccgagggcggcatctgcaggaggggaggagcggcggcggtgggcgagggcgaggagcaccagctgccaccgccgccgccgggcagcttctggaacgtggagagcgccgctgcccctggcatcggttgtccggcggccacctcctcgagcagtgccacccgaggccggggcagctctgttggcgggggcagccgacggaccacggtggcatatgtgatcaacgaagcgagccaagggcaactggtggtggccgagagcgaggccctgcagagcttgcgggaggcgtgcgagacagtgggcgccaccctggaaaccctgcattttgggaaactcgactttggagaaaccaccgtgctggaccgcttttacaatgcagatattgcggtggtggagatgagcgatgccttccggcagccgtccttgttttaccaccttggggtgagagaaagtttcagcatggccaacaacatcatcctctactgtgatactaactcggactctctgcagtcactgaaggaaataatttgccagaagaatactatgtgcactgggaactacacctttgttccttacatgataactccacataacaaagtctactgctgtgacagcagcttcatgaaggggttgacagagctcatgcaaccgaacttcgagctgcttcttggacccatctgcttacctcttgtggatcgttttattcaacttttgaaggtggcacaagcaagttctagccagtacttccgggaatctatactcaatgacatcaggaaagctcgtaatttatacactggtaaagaattggcagctgagttggcaagaattcggcagcgagtagataatatcgaagtcttgacagcagatattgtcataaatctgttactttcctacagagatatccaggactatgattctattgtgaagctggtagagactttagaaaaactgccaacctttgatttggcctcccatcaccatgtgaagtttcattatgcatttgcactgaataggagaaatctccctggtgacagagcaaaagctcttgatattatgattcccatggtgcaaagcgaaggacaagttgcttcagatatgtattgcctagttggtcgaatctacaaagatatgtttttggactctaatttcacggacactgaaagcagagaccatggagcttcttggttcaaaaaggcatttgaatctgagccaacactacagtcaggaattaattatgcggtcctcctcctggcagctggacaccagtttgaatcttcctttgagctccggaaagttggggtgaagctaagtagtcttcttggtaaaaagggaaacttggaaaaactccagagctactgggaagttggattttttctgggggccagcgtcctagccaatgaccacatgagagtcattcaagcatctgaaaagctttttaaactgaagacaccagcatggtacctcaagtctattgtagagacaattttaatatataagcattttgtgaaactgaccacagaacagcctgtggccaagcaagaacttgtggacttttggatggatttcctggtcgaggccacaaagacagatgttactgtggttaggtttccagtattaatattagaaccaaccaaaatctatcaaccttcttatttgtctatcaacaatgaagttgaggaaaagacaatctctatttggcacgtgcttcctgatgacaagaaaggtatacatgagtggaattttagtgcctcttctgtcaggggagtgagtatttctaaatttgaagaaagatgctgctttctttatgtgcttcacaattctgatgatttccaaatctatttctgtacagaacttcattgtaaaaagttttttgagatggtgaacaccattaccgaagagaaggggagaagcacagaggaaggagactgtgaaagtgacttgctggagtatgactatgaatatgatgaaaatggtgacagagtcgttttaggaaaaggcacttatgggatagtctacgcaggtcgggacttgagcaaccaagtcagaattgctattaaggaaatcccagagagagacagcagatactctcagcccctgcatgaagaaatagcattgcataaacacctgaagcacaaaaatattgtccagtatctgggctctttcagtgagaatggtttcattaaaatcttcatggagcaggtccctggaggaagtctttctgctctccttcgttccaaatggggtccattaaaagacaatgagcaaacaattggcttttatacaaagcaaatactggaaggattaaaatatctccatgacaatcagatagttcaccgggacataaagggtgacaatgtgttgattaatacctacagtggtgttctcaagatctctgacttcggaacatcaaagaggcttgctggcataaacccctgtactgaaacttttactggtaccctccagtatatggcaccagaaataatagataaaggaccaagaggctacggaaaagcagcagacatctggtctctgggctgtacaatcattgaaatggccacaggaaaacccccattttatgaactgggagaaccacaagcagctatgttcaaggtgggaatgtttaaagtccaccctgagatcccagagtccatgtctgcagaggccaaggcattcatactgaaatgttttgaaccagatcctgacaagagagcctgtgctaacgacttgcttgttgatgagtttttaaaagtttcaagcaaaaagaaaaagacacaacctaagctttcagctctttcagctggatcaaatgaatatctcaggagtatatccttgccggtacctgtgctggtggaggacaccagcagcagcagtgagtacggctcagtttcacccgacacggagttgaaagtggaccccttctctttcaaaacaagagccaagtcctgcggagaaagagatgtcaagggaattcggacactctttttgggcattccagatgagaattttgaagatcacagtgctcctccttcccctgaagaaaaagattctggattcttcatgctgaggaaggacagtgagaggcgagctacccttcacaggatcctgacggaagaccaagacaaaattgtgagaaacctaatggaatctttagctcagggggctgaagaaccgaaactaaaatgggaacacatcacaaccctcattgcaagcctcagagaatttgtgagatccactgaccgaaaaatcatagccaccacactgtcaaagctgaaactggagctggacttcgacagccatggcattagccaagtccaggtggtactctttggttttcaagatgctgtcaataaagttcttcggaatcataacatcaagccgcactggatgtttgccttagacagtatcattcggaaggcggtacagacagccattaccatcctggttccagaactaaggccacatttcagccttgcatctgagagtgatactgctgatcaagaagacttggatgtagaagatgaccatgaggaacagccttcaaatcaaactgtccgaagacctcaggctgtcattgaagatgctgtggctacctcaggcgtgagcacgctcagttctactgtgtctcatgattcccagagtgctcaccggtcactgaatgtacagcttggaaggatgaaaatagaaaccaatagattactggaagaattggttcggaaagagaaagaattacaagcactccttcatcgagctattgaagaaaaagaccaagaaattaaacacctgaagcttaagtcccaacccatagaaattcctgaattgcctgtatttcatctaaattcttctggcacaaatactgaagattctgaacttaccgactggctgagagtgaatggagctgatgaagacactataagccggtttttggctgaagattatacactattggatgttctctactatgttacacgtgatgacttaaaatgcttgagactaaggggagggatgctgtgcacactgtggaaggctatcattgactttcgaaacaaacagacttga

SEQ ID NO: 368 - DNA, 3498 bp, Homo sapiens;
atggcgaacgactcccctgcaaaaagtctggtggacatcgacctctcctccctgcgggatcctgctgggatttttgagctggtggaagtggttggaaatggcacctatggacaagtctataagggtcgacatgttaaaacgggtcagttggcagccatcaaagttatggatgtcactgaggatgaagaggaagaaatcaaactggagataaatatgctaaagaaatactctcatcacagaaacattgcaacatattatggtgctttcatcaaaaagagccctccaggacatgatgaccaactctggcttgttatggagttctgtggggctgggtccattacagaccttgtgaagaacaccaaagggaacacactcaaagaagactggatcgcttacatctccagagaaatcctgaggggactggcacatcttcacattcatcatgtgattcaccgggatatcaagggccagaatgtgttgctgactgagaatgcagaggtgaaacttgttgactttggtgtgagtgctcagctggacaggactgtggggcggagaaatacgttcataggcactccctactggatggctcctgaggtcatcgcctgtgatgagaacccagatgccacctatgattacagaagtgatctttggtcttgtggcattacagccattgagatggcagaaggtgctccccctctctgtgacatgcatccaatgagagcactgtttctcattcccagaaaccctcctccccggctgaagtcaaaaaaatggtcgaagaagttttttagttttatagaagggtgcctggtgaagaattacatgcagcggccctctacagagcagcttttgaaacatccttttataagggatcagccaaatgaaaggcaagttagaatccagcttaaggatcatatagatcgtaccaggaagaagagaggcgagaaagatgaaactgagtatgagtacagtgggagtgaggaagaagaggaggaagtgcctgaacaggaaggagagccaagttccattgtgaacgtgcctggtgagtctactcttcgccgagatttcctgagactgcagcaggagaacaaggaacgttccgaggctcttcggagacaacagttactacaggagcaacagctccgggagcaggaagaatataaaaggcaactgctggcagagagacagaagcggattgagcagcagaaagaacagaggcgacggctagaagagcaacaaaggagagagcgggaagctagaaggcagcaggaacgtgaacagcgaaggagagaacaagaagaaaagaggcgtctagaggagttggagagaaggcgcaaagaagaagaggagaggagacgggcagaagaagaaaagaggagagttgaaagagaacaggagtatatcaggcgacagctagaagaggagcagcggcacttggaagtccttcagcagcagctgctccaggagcaggccatgttactgcatgaccataggaggccgcacccgcagcactcgcagcagccgccaccaccgcagcaggaaaggagcaagccaagcttccatgctcccgagcccaaagcccactacgagcctgctgaccgagcgcgagaggttcctgtgagaacaacatctcgctcccctgttctgtcccgtcgagattccccactgcagggcagtgggcagcagaatagccaggcaggacagagaaactccaccagtattgagcccaggcttctgtgggagagagtggagaagctggtgcccagacctggcagtggcagctcctcagggtccagcaactcaggatcccagcccgggtctcaccctgggtctcagagtggctccggggaacgcttcagagtgagatcatcatccaagtctgaaggctctccatctcagcgcctggaaaatgcagtgaaaaaacctgaagataaaaaggaagttttcagacccctcaagcctgctgtaaggattgatctgaccgcactggccaaagagcttcgagcagtggaagatgtacggccacctcacaaagtaacggactactcctcatccagtgaggagtcggggacgacggatgaggaggacgacgatgtggagcaggaaggggctgacgagtccacctcaggaccagaggacaccagagcagcgtcatctctgaatttgagcaatggtgaaacggaatctgtgaaaaccatgattgtccatgatgatgtagaaagtgagccggccatgaccccatccaaggagggcactctaatcgtccgccagactcagtccgctagtagcacactccagaaacacaaatcttcctcctcctttacaccttttatagaccccagattactacagatttctccatctagcggaacaacagtgacatctgtggtgggattttcctgtgatgggatgagaccagaagccataaggcaagatcctacccggaaaggctcagtggtcaatgtgaatcctaccaacactaggccacagagtgacaccccggagattcgtaaatacaagaagaggtttaactctgagattctgtgtgctgccttatggggagtgaatttgctagtgggtacagagagtggcctgatgctgctggacagaagtggccaagggaaggtctatcctcttatcaaccgaagacgatttcaacaaatggacgtacttgagggcttgaatgtcttggtgacaatatctggcaaaaaggataagttacgtgtctactatttgtcctggttaagaaataaaatacttcacaatgatccagaagttgagaagaagcagggatggacaaccgtaggggatttggaaggatgtgtacattataaagttgtaaaatatgaaagaatcaaatttctggtgattgctttgaagagttctgtggaagtctatgcgtgggcaccaaagccatatcacaaatttatggcctttaagtcatttggagaattggtacataagccattactggtggatctcactgttgaggaaggccagaggttgaaagtgatctatggatcctgtgctggattccatgctgttgatgtggattcaggatcagtctatgacatttatctaccaacacatgtaagaaagaacccacactctatgatccagtgtagcatcaaaccccatgcaatcatcatcctccccaatacagatggaatggagcttctggtgtgctatgaagatgagggggtttatgtaaacacatatggaaggatcaccaaggatgtagttctacagtggggagagatgcctacatcagtagcatatattcgatccaatcagacaatgggctggggagagaaggccatagagatccgatctgtggaaactggtcacttggatggtgtgttcatgcacaaaagggctcaaagactaaaattcttgtgtgaacgcaatgacaaggtgttctttgcctctgttcggtctggtggcagcagtcaggtttatttcatgaccttaggcaggacttctcttctgagctggtag

SEQ ID NO: 369 - DNA, 1083 bp, Homo sapiens;
atggcggcggcggcggcggcgggcgcgggcccggagatggtccgcgggcaggtgttcgacgtggggccgcgctacaccaacctctcgtacatcggcgagggcgcctacggcatggtgtgctctgcttatgataatgtcaacaaagttcgagtagctatcaagaaaatcagcccctttgagcaccagacctactgccagagaaccctgagggagataaaaatcttactgcgcttcagacatgagaacatcattggaatcaatgacattattcgagcaccaaccatcgagcaaatgaaagatgtatatatagtacaggacctcatggaaacagatctttacaagctcttgaagacacaacacctcagcaatgaccatatctgctattttctctaccagatcctcagagggttaaaatatatccattcagctaacgttctgcaccgtgacctcaagccttccaacctgctgctcaacaccacctgtgatctcaagatctgtgactttggcctggcccgtgttgcagatccagaccatgatcacacagggttcctgacagaatatgtggccacacgttggtacagggctccagaaattatgttgaattccaagggctacaccaagtccattgatatttggtctgtaggctgcattctggcagaaatgctttctaacaggcccatctttccagggaagcattatcttgaccagctgaaccacattttgggtattcttggatccccatcacaagaagacctgaattgtataataaatttaaaagctaggaactatttgctttctcttccacacaaaaataaggtgccatggaacaggctgttcccaaatgctgactccaaagctctggacttattggacaaaatgttgacattcaacccacacaagaggattgaagtagaacaggctctggcccacccatatctggagcagtattacgacccgagtgacgagcccatcgccgaagcaccattcaagttcgacatggaattggatgacttgcctaaggaaaagctcaaagaactaatttttgaagagactgctagattccagccaggatacagatcttaa

SEQ ID NO: 370 - DNA, 1083 bp, Homo sapiens;
atgtctcaggagaggcccacgttctaccggcaggagctgaacaagacaatctgggaggtgcccgagcgttaccagaacctgtctccagtgggctctggcgcctatggctctgtgtgtgctgcttttgacacaaaaacggggttacgtgtggcagtgaagaagctctccagaccatttcagtccatcattcatgcgaaaagaacctacagagaactgcggttacttaaacatatgaaacatgaaaatgtgattggtctgttggacgtttttacacctgcaaggtctctggaggaattcaatgatgtgtatctggtgacccatctcatgggggcagatctgaacaacattgtgaaatgtcagaagcttacagatgaccatgttcagttccttatctaccaaattctccgaggtctaaagtatatacattcagctgacataattcacagggacctaaaacctagtaatctagctgtgaatgaagactgtgagctgaagattctggattttggactggctcggcacacagatgatgaaatgacaggctacgtggccactaggtggtacagggctcctgagatcatgctgaactggatgcattacaaccagacagttgatatttggtcagtgggatgcataatggccgagctgttgactggaagaacattgtttcctggtacagaccatattaaccagcttcagcagattatgcgtctgacaggaacaccccccgcttatctcattaacaggatgccaagccatgaggcaagaaactatattcagtctttgactcagatgccgaagatgaactttgcgaatgtatttattggtgccaatcccctggctgtcgacttgctggagaagatgcttgtattggactcagataagagaattacagcggcccaagcccttgcacatgcctactttgctcagtaccacgatcctgatgatgaaccagtggccgatccttatgatcagtcctttgaaagcagggacctccttatagatgagtggaaaagcctgacctatgatgaagtcatcagctttgtgccaccaccccttgaccaagaagagatggagtcctga

SEQ ID NO: 371 - DNA, 984 bp, Homo sapiens;
atgcctgggccgacccaaaccctgtccccaaatggcgagaacaacaacgacatcatccaggataataacgggaccatcattcctttccggaagcacacagtgcgcggggagcgttcctacagttggggaatggcggtcaatgtgtattctacctcgataacccaagagactatgagcagacatgacatcattgcatgggttaatgacatagtatctttaaactacacaaaagtggaacagctttgttcaggagcggcctattgccaattcatggacatgctcttccctggctgcattagtttgaagaaagtaaaatttcaagcaaagctggaacatgaatatattcacaattttaaacttctgcaagcatcatttaagcgaatgaacgttgataaggtaattccagtggagaagctagtgaaaggacgtttccaggacaacctggattttattcaatggtttaagaaattctatgatgctaactacgatgggaaggagtatgatcctgtagaggcacgacaagggcaagatgcaattcctcctcctgaccctggtgaacagatcttcaacctgccaaaaaagtctcaccatgcaaactcccccacagcaggtgcagctaaatcaagtccagcagctaaaccaggatccacaccttctcgaccctcatcagccaaaagggcttcttccagtggctcagcatccaaatccgataaagatttagaaacgcaggtcatacagcttaatgaacaggtacattcattaaaacttgcccttgaaggcgtggaaaaggaaagggatttctactttgggaagttgagagagatcgagctactctgccaagaacacgggcaggaaaatgatgacctcgtgcagagactaatggacatcctgtatgcttcagaagaacacgagggccacacagaagagccggaagcagaggagcaagcccacgaacagcagcccccgcagcaggaagagtactga

SEQ ID NO: 372 - DNA, 2115 bp, Homo sapiens;
atggagtctaaaccttcaaggattccaagaagaatttctgttcaaccttccagctccttaagtgctaggatgatgtctggaagcagaggaagtagtttaaatgatacctatcactcaagagactcttcatttagattggattctgaatatcagtctacatcagcatcagcatctgcgtcaccatttcaatctgcatggtatagtgaatctgagataactcagggagcacgctcaagatcgcagaaccagcaacgggatcatgattcaaaaagacctaaactttcctgtacaaactgtactacctcagctgggagaaatgttggaaatggtttaaacacattatcagattcatcttggaggcatagtcaagttcctagatcttcatcaatggtacttggatcatttggaacagacttaatgagagagaggagagatttggagagaagaacagattcctctattagtaatcttatggattatagtcaccgaagtggtgatttcacaacttcatcatatgttcaagacagagttccttcatattcacaaggagcaagaccaaaagaaaactcaatgagcactttacagttgaatacatcatccacaaaccaccaattgccttctgaacatcagaccatactaagttctagggactccagaaattctttaagatcaaatttttcttcaagagaatcagaatcttcccgaagcaatacgcagcctggattttcttacagttcaagtagagatgaagccccaatcataagcaattcagaaagggttgtttcatctcaaagaccatttcaagaatcttctgacaatgaaggtaggcggacaacgaggagattgctgtcacgcatagcttctagcatgtcatctacttttttttcacgaagatctagtcaggattccttgaatacaagatcattgaattctgaaaattcttacgtttctccaagaatcttgacagcttcacagtcccgtagtaatgtaccatcagcttctgaagttcccgataatagggcatctgaagcttctcagggatttcgatttcttaggcgaagatggggtttgtcatctcttagccacaatcatagctctgagtcagattcagaaaattttaaccaagaatctgaaggtagaaatacaggaccatggttatcttcctcacttagaaatagatgcacacctttgttctctagaaggaggcgagagggaagagatgaatcttcaaggatacctacctctgatacatcatctagatctcatatttttagaagagaatcaaatgaagtggttcaccttgaagcacagaatgatcctcttggagctgctgccaacagaccacaagcatctgcagcatcaagcagtgccacaacaggtggctctacatcagattcggctcaaggtggaagaaatacaggaatatcagggattcttcctggttccttattccggtttgcagtccctccagcacttgggagtaatttgaccgacaatgtcatgatcacagtagatattattccttcaggttggaattcagctgatggtaaaagtgataaaactaaaagtgcgccttcaagagatccagaaagattgcagaaaataaaagagagcctccttttagaggactcagaagaagaagaaggtgacttatgtagaatttgtcaaatggcagctgcatcatcatctaatttgctgatagagccatgcaagtgcacaggaagtttgcagtatgtccaccaagactgtatgaaaaagtggttacaggccaaaattaactctggttcttcattagaagctgtaaccacctgtgaactatgtaaagagaagttggagcttaacctggaggattttgatattcatgaactacatagagctcatgcaaatgaacaagctgagtatgagtttatcagctctggtctctacctagtggtgttattgcacttgtgcgaacaaagcttttctgatatgatgggaaatacaaatgaaccaagcacacgtgtccgatttattaaccttgcaagaactcttcaggcacatatggaagatctcgaaacttcagaggatgattccgaagaagacggagaccataacaggacatttgatattgcctaa

SEQ ID NO: 373 - DNA, 876 bp, Homo sapiens;
atgagcatgccactgcatcagatctctgccattccatcccaggatgccatctctgctagagtctacagaagtaagaccaaagaaaaggagagggaagaacagaatgagaagactttgggacatttcatgagtcattcaagcaacatttctaaggctgggagtcctccgtcagcatcagctccggctccggtgtcctccttctctcgcacttctatcacgccatccagccaggacatctgcaggatctgccactgtgaaggagatgatgagagccccctgatcaccccctgccactgcacaggaagcctccacttcgtgcaccaggcctgcctgcagcagtggatcaagagctccgacacgcgctgctgcgagctctgcaagtatgagttcatcatggagaccaagctgaagccactgagaaaatgggagaagttgcagatgacgtccagcgagcgcaggaagatcatgtgctcagtgacattccacgtcattgccatcacatgtgtggtctggtccttgtatgtgctcattgaccgtactgctgaggagatcaagcaggggcaggcaacaggaatcctagaatggcccttttggactaaattggtggttgtggccatcggcttcaccggaggacttctttttatgtatgttcagtgtaaagtgtatgtgcaattgtggaagagactcaaggcctataatagagtgatctatgttcaaaactgtccagaaacaagcaaaaagaatatttttgaaaaatctccactaacagagcccaactttgaaaataaacatggatatggaatctgtcattccgacacaaactcttcttgttgcacagagcctgaagacactggagcagaaatcattcacgtctga

SEQ ID NO: 374 - DNA, 2190 bp, Homo sapiens;
atgtccactaggaccccattgccaacggtgaatgaacgagacactgaaaaccacacgtcacatggagatgggcgtcaagaagttacctctcgtaccagccgctcaggagctcggtgtagaaactctatagcctcctgtgcagatgaacaacctcacatcggaaactacagactgttgaaaacaatcggcaaggggaattttgcaaaagtaaaattggcaagacatatccttacaggcagagaggttgcaataaaaataattgacaaaactcagttgaatccaacaagtctacaaaagctcttcagagaagtaagaataatgaagattttaaatcatcccaatatagtgaagttattcgaagtcattgaaactgaaaaaacactctacctaatcatggaatatgcaagtggaggtgaagtatttgactatttggttgcacatggcaggatgaaggaaaaagaagcaagatctaaatttagacagattgtgtctgcagttcaatactgccatcagaaacggatcgtacatcgagacctcaaggctgaaaatctattgttagatgccgatatgaacattaaaatagcagatttcggttttagcaatgaatttactgttggcggtaaactcgacacgttttgtggcagtcctccatacgcagcacctgagctcttccagggcaagaaatatgacgggccagaagtggatgtgtggagtctgggggtcattttatacacactagtcagtggctcacttccctttgatgggcaaaacctaaaggaactgagagagagagtattaagagggaaatacagaattcccttctacatgtctacagactgtgaaaaccttctcaaacgtttcctggtgctaaatccaattaaacgcggcactctagagcaaatcatgaaggacaggtggatcaatgcagggcatgaagaagatgaactcaaaccatttgttgaaccagagctagacatctcagaccaaaaaagaatagatattatggtgggaatgggatattcacaagaagaaattcaagaatctcttagtaagatgaaatacgatgaaatcacagctacatatttgttattggggagaaaatcttcagagctggatgctagtgattccagttctagcagcaatctttcacttgctaaggttaggccgagcagtgatctcaacaacagtactggccagtctcctcaccacaaagtgcagagaagtgtttcttcaagccaaaagcaaagacgctacagtgaccatgctggaccagctattccttctgttgtggcgtatccgaaaaggagtcagaccagcactgcagatagtgacctcaaagaagatggaatttcctcccggaaatcaagtggcagtgctgttggaggaaagggaattgctccagccagtcccatgcttgggaatgcaagtaatcctaataaggcggatattcctgaacgcaagaaaagctccactgtccctagtagtaacacagcatctggtggaatgacacgacgaaatacttatgtttgcagtgagagaactacagctgatagacactcagtgattcagaatggcaaagaaaacagcactattcctgatcagagaactccagttgcttcaacacacagtatcagtagtgcagccaccccagatcgaatccgcttcccaagaggcactgccagtcgtagcactttccacggccagccccgggaacggcgaaccgcaacatataatggccctcctgcctctcccagcctgtcccatgaagccacaccattgtcccagactcgaagccgaggctccactaatctctttagtaaattaacttcaaaactcacaaggagtcgcaatgtatctgctgagcaaaaagatgaaaacaaagaagcaaagcctcgatccctacgcttcacctggagcatgaaaaccactagttcaatggatcccggggacatgatgcgggaaatccgcaaagtgttggacgccaataactgcgactatgagcagagggagcgcttcttgctcttctgcgtccacggagatgggcacgcggagaacctcgtgcagtgggaaatggaagtgtgcaagctgccaagactgtctctgaacggggtccggtttaagcggatatcggggacatccatagccttcaaaaatattgcttccaaaattgccaatgagctaaagctgtaa

SEQ ID NO: 375 - DNA, 3930 bp, Homo sapiens;
atggacgagtcgagcctcctgcggcgccgcgggctccagaaggagctgagcctgccacgccgaggacgtggctgccgcagcgggaaccgcaagagcttggtggtaggaacgccctccccgaccctctcccggcccctgtcgccattgtcggtcccaacggcaggcagcagccccttggatagtcctcggaatttctcggctgcctctgccctaaatttcccctttgcccggagggcagacggcagaagatggtccctcgcgtctctcccatcttccggctatggaaccaacacacccagctccaccctctcgtcaagctcatcctcccgggaacgtctccaccagcttcccttccagccgacgccggacgagctgcacttcctgtccaagcacttccgcagctcagagaatgtgcttgatgaggaaggcggccggtcaccccgcctccgaccccgctctcgcagtctcagcccgggccgtgcaacggggaccttcgacaatgagattgtcatgatgaatcacgtgtaccgggagaggttccccaaggccacagcacagatggagggccgtctgcaggagttcctgacggcctacgcgcccggcgcccggctggcgctggctgatggcgtcttgggcttcatccaccaccagatcgtcgagctggcccgagactgcttggccaagtctggcgagaacctcgtcacctcccgctacttcctagagatgcaggagaagctggagcggcttctgcaggatgcccatgagcgttcggacagtgaggaggtcagcttcatcgtccagcttgtccggaaactgctgatcatcatctcacggccagctcggctgctggagtgtctggagtttgaccctgaggaattttaccacctgctggaggcggctgagggccatgcgcgggagggccaaggcattaagactgaccttccacagtacatcattgggcagctgggcctggccaaggaccccctggaggagatggtgccactgagtcacctcgaagaagaacagcccccagcacctgagtccccagagagccgcgccctggtcggccagtcacggaggaagccatgcgaaagcgactttgagaccatcaaactcattagcaacggagcctatggggccgtctacctggtgcggcaccgtgacacacggcagcgctttgccatcaagaagatcaacaaacagaacttgatcctgcgtaaccagatccagcaggtctttgtggagcgtgacattctcacctttgccgagaacccctttgtggtcagcatgttctgctcctttgagacccggcgccacctatgtatggtcatggaatacgtggaaggcggcgactgcgccacgctcctgaagaacatgggcccgctgcccgtggacatggcccgcctgtacttcgccgagacggtgttggcgctggagtacctgcataactatggcatcgtgcaccgtgacctcaaaccagacaatctgctcatcacctcgcttggccacatcaagctcacggacttcggcctgtccaagatcggcctcatgagcatggccaccaacctctatgagggccacatcgagaaggacgcccgagagttcatcgacaagcaggtgtgtgggacgccggagtacatagcccccgaggtgatcttccgccagggctatgggaagccagtggactggtgggccatgggcgtcgtcctctatgagtttctggtgggctgcgtgcctttctttggagatacccccgaggaactcttcggtcaggtggtcagcgatgagatcatgtggccagagggagatgaggcccttccagcagacgcccaggacctcatcaccaggttgctccggcagagcccgctggaccgtctgggcactggtggcacccacgaagtgaagcagcacccctttttcctggccctggactgggcagggcttctccgacacaaagccgagttcgtgccccagctcgaagctgaggatgataccagctactttgacacacgttcggaacgttaccgccatctgggctccgaggacgacgagaccaatgatgaagaatcgtccacagagatcccccagttctcctcctgctcccaccggttcagcaaggtctacagcagctctgagttcctggccgtccagcccactcctaccttcgctgaaaggagcttcagtgaagaccgggaggaggggtgggagcgcagcgaagtggactatggccgccggctgagtgctgacatccggctgaggtcctggacatcctctggatcctcctgtcagtcatcttcgtcccagcccgagcggggtcccagcccatctctcctgaataccatcagcctggacacaatgcccaagtttgccttctcatcagaggatgagggggtaggcccaggccctgcaggccccaagaggcccgtcttcattctaggggagcctgaccccccaccagcggccaccccagtgatgcccaagccctcgagcctttctgccgacacagctgctctcagccacgcccgcctacggagcaatagcatcggcgcccgacactccacaccaaggcctctggatgccggccggggccgccgccttgggggcccaagagacccagcccctgagaagtccagagcctcctccagcggtggcagtggtggcggcagtgggggccgcgtgcccaagtcagcctctgtctctgccctgtccctcatcatcacggcagatgatggcagcggcggccccctcatgagccccctttccccgcgctctctgtcctcgaacccgtcgtcccgtgactcttcgccgagccgagacccgtcccccgtgtgtggcagcctgcggccccccatcgttatccacagctctggcaagaagtacggcttcagcctgcgggcgatccgcgtctacatgggtgatagcgacgtctacactgtgcaccacgtcgtctggagtgtggaggacggaagccccgcccaggaggcgggcctgcgggctggggacctcatcacccacatcaacggggagtcagtgctggggctggtgcacatggacgtcgtggagctgctgctgaagagcggcaacaagatatccctgcggaccacagccctggagaacacctccatcaaggtgggccccgcccggaagaatgtggccaagggccgcatggcacgcaggagcaagaggagccgtcggcgggagacccaggatcggcggaagtcacttttcaagaagatctccaagcagacctccgtgctgcacaccagccgcagcttctcctccggactccaccactcactgtcatccagtgagagcctccccggctcgcccacccacagcctctcccccagccccaccactccctgccgaagcccagcccctgatgtcccagcagataccactgcatccccacccagcgcatccccgagctccagcagccccgcctccccagctgctgctggccacacccgccccagctccctgcacggcctggctgccaagcttgggccaccccgccccaagactggccgccgcaagtccaccagcagcatcccgccctccccgctggcctgcccgcccatctccgcgcccccaccccgctcgccctcgcccctgcccgggcacccgcccgcacctgcccgatccccgcggctgcgccggggccagtcagctgacaagctgggcacaggggagcggctggatggggaggcggggcggcgcactcgtgggccagaggccgagctcgtggtcatgcggcggctgcacctgtccgagcgccgagactccttcaagaagcaggaggccgtgcaggaggttagcttcgatgagccgcaggaggaggccactgggctgcccacctcagtgccacagatcgccgtggagggcgaggaagccgtgccagtagctctcgggcccaccggaagagactga

SEQ ID NO: 376 - DNA, 483 bp, Homo sapiens;
atgagcgataacgatgacatcgaggtggagagcgacgaagagcaaccgaggtttcaatctgcggctgacaaacgggctcatcataatgcactggaacgaaaacgtagggaccacatcaaagacagctttcacagtttgcgggactcagtcccatcactccaaggagagaaggcatcccgggcccaaatcctagacaaagccacagaatatatccagtatatgcgaaggaaaaaccacacacaccagcaagatattgacgacctcaagcggcagaatgctcttctggagcagcaagtccgtgcactggagaaggcgaggtcaagtgcccaactgcagaccaactacccctcctcagacaacagcctctacaccaacgccaagggcagcaccatctctgccttcgatgggggctcggactccagctcggagtctgagcctgaagagccccaaagcaggaagaagctccggatggaggccagctaa

SEQ ID NO: 377 - DNA, 561 bp, Homo sapiens;
atggcgtcacagaagagaccctcccagaggcacggatccaagtacctggccacagcaagtaccatggaccatgccaggcatggcttcctcccaaggcacagagacacgggcatccttgactccatcgggcgcttctttggcggtgacaggggtgcgcccaagcggggctctggcaaggtaccctggctaaagccgggccggagccctctgccctctcatgcccgcagccagcctgggctgtgcaacatgtacaaggactcacaccacccggcaagaactgctcactacggctccctgccccagaagtcacacggccggacccaagatgaaaaccccgtagtccacttcttcaagaacattgtgacgcctcgcacaccacccccgtcgcagggaaagggggccgaaggccagagaccaggatttggctacggaggcagagcgtccgactataaatcggctcacaagggattcaagggagtcgatgcccagggcacgctttccaaaatttttaagctgggaggaagagatagtcgctctggatcacccatggctagacgctga

SEQ ID NO: 378 - DNA, 2637 bp, Homo sapiens;
atggatctggataaaccatctgtttggggctcattaaaacagcggaccaggccattgttgatcaacttgagcaagaagaaggtgaaaaagaacccaagtaagcccccagatctacgggcaaggcatcacttggaccgccgtctcagcctctctgtgcctgatctcctggaggctgaggccttggccccagagggccggccttactccgggccacagtcttcctacacctcggtgcccagcagtctgtccactgcagggatctttcccaagagcagcagtagctccttgaaacagtctgaagaagaattggattggagccaggaagaagccagtcacctccatgtggtggaaacagactcagaggaggcctatgcctctcctgctgagcggagacgggtgtccagcaacggcatctttgatcttcagaaaacttcccttggaggggatgcaccagaagagccagagaagctatgtggaagcagtgacctgaatgcttctatgacatctcaacattttgaagaacaatctgtaccgggggaagccagtgatggcttgagtaacctccccagcccttttgcgtacctcctcaccatacacctgaaggaaggccggaacctggttgtccgagatcgctgtggcacaagtgatccttatgtgaaatttaagctgaatgggaagacgctgtacaaaagtaaagtcatatataagaacttgaacccagtatgggatgagatagttgtattgccaatccaaagccttgatcaaaagctacgtgtgaaggtatatgatcgagatttaaccacatctgatttcatgggttctgcatttgtcattctcagtgatcttgagcttaacagaacaactgaacatattttaaaactggaagatccaaacagtttagaagatgacatgggagtgatcgtgttaaatttgaacctagtggtaaaacagggtgatttcaagagacaccgttggtcaaatcggaagcgattaagtgccagcaagtcctctttgatacgcaacctacggctctctgagtccttgaaaaagaaccaactctggaacgggattataagtataactttgttggaagggaagaatgtctcaggaggaagcatgacagagatgtttgtccagttaaaactgggagatcagaggtataaaagtaagacactgtgtaagagtgcaaatccgcagtggcaggaacagtttgactttcactacttctctgacaggatgggcattttggacattgaagtgtggggaaaggacaacaaaaagcatgaggaacgtctgggcacgtgtaaagtggatatctcggcactccctctgaagcaagccaactgcctggagctgccactggacagctgtctgggggctctccttatgttggtcacacttacaccctgtgcgggggtctccgtctctgatctgtgtgtctgccccttagcagacctcagcgaaagaaagcagattacccagcgatattgcttacagaactccctgaaagatgtgaaagacgtcggcattctacaagtgaaggttttaaaggcagcagatctcttagcggcagatttctcagggaagagtgacccattttgcttgttggagttaggcaatgaccgacttcagacgcataccgtctacaaaaacctcaaccctgaatggaacaaagtttttacatttcccattaaagatatccatgatgttttggaagtgacagtgtttgatgaagatggagataaacccccagattttcttggaaaagttgccattcccttgctgtccattagagatggacaaccgaattgttatgtactaaagaataaagatttagaacaagcttttaaaggagttatttacttagagatggaccttatatataatccggtgaaagcaagtattaggacttttactccccgggaaaagcgctttgttgaagacagccgcaagctgtccaaaaagatcttatcaagagatgtggaccgtgtgaaaagaatcactatggcaatatggaatacaatgcagttccttaaaagctgcttccagtgggaatccacattaagaagtacaatagcattcgcggtatttttgatcactgtctggaattttgaactatatatgatccccttggcattgttgctgatctttgtctacaatttcatcagacctgtgaaaggcaaggtcagcagcatccaggacagccaggagagcacagacatagatgacgaggaggatgaagatgacaaggaatctgagaaaaaggggttgattgaaagaatctatatggtacaggatattgtttcaactgttcaaaacgtcttggaggaaatagcttcttttggagaaaggattaagaacacatttaactggacggtccccttcctttcatctctggcctgtttgattctggcagcagccaccatcattttgtatttcattccactgcggtacatcattttaatctggggcataaataaatttactaagaagcttcgaaatccctattccatcgacaataatgagctactagacttcctctctagggtaccgtctgatgttcaaaaggtgcagtatgcagaattgaaactctgcagcagccacagccccctgcggaagaagcgcagcgctctctag

SEQ ID NO: 379 - DNA, 6525 bp, Homo sapiens;
atgagtgcctccttcgtgccgaacggggccagcctggaagattgtcactgtaacctcttctgcctggctgacttgacaggaattaagtggaaaaaatatgtatggcaaggcccaacttctgcccctattctgtttcctgtgacagaagaagaccccattttgagcagttttagtcgctgccttaaggcagatgtacttggtgtttggcggcgagatcaaagacctggaagaagagaattgtggatattttggtggggtgaagaccccagttttgctgaccttattcaccatgacttatcagaagaagaagatggagtgtgggagaatggactttcctatgaatgccgtactctgcttttcaaagcagttcacaatctattggaacggtgtttaatgaacaggaattttgtacgtattggcaagtggtttgtaaagccttatgaaaaagatgaaaaacctataaataaaagtgaacacttgtcctgctccttcacctttttcttgcatggagacagcaatgtttgtaccagtgtggaaattaaccaacatcaacctgtataccttctcagtgaagagcatatcacccttgctcaacagtctaatagcccatttcaagttatcttatgcccatttggactaaatggcactctcacaggacaggcattcaagatgtctgattcagctacaaaaaaattaattggtgaatggaaacagttctatcctatctcatgttgcttgaaggagatgtctgaagaaaaacaggaagatatggattgggaagatgattctttagctgcagtagaagttcttgttgctggtgtccgaatgatctacccagcatgctttgttctagtccctcagtcagacattcctactcctagccctgtgggatccactcactgttcatcttcttgcttgggtgtccaccaagtgcctgcttccacaagagatcctgctatgtcttcggttacgcttacaccacctacgtctcctgaggaagtccaaacagttgatcctcagtctgtccagaagtgggtcaaattttcttcagtatctgatggcttcaactccgatagtactagccaccatggtgggaaaatacccagaaaattagcaaatcatgtggtggatagagtttggcaagaatgcaatatgaacagagcacagaacaagaggaagtattctgcttcatcaggtggtctatgcgaagaagcgacagctgctaaagtggcatcctgggattttgttgaagccacacaaagaacaaattgcagttgtttgaggcacaaaaatctcaagtcaagaaatgctggacaacaaggacaggcaccatctttaggtcagcaacaacaaatacttcctaagcacaagaccaatgagaagcaagaaaagagtgaaaagccacagaaacgccccttgactccttttcaccatcgtgtgtctgttagtgatgatgttggcatggacgcagattcagccagccaaagacttgtgatctctgctccagacagtcaagtgagattttcaaatatccgaactaatgatgtagcaaagactcctcagatgcatggcaccgaaatggcaaattcacctcaaccacccccacttagtcctcacccttgtgatgtggttgatgaaggagtgactaaaacaccttcaactcctcagagtcaacatttttatcaaatgccaacaccagatcccttggttccttctaaaccaatggaagataggatagacagtttgtcccagtctttcccacctcaatatcaggaagctgtagaacctacagtatatgttggtacagcagtaaacttggaagaagatgaagccaatatagcctggaagtattacaagttcccaaagaaaaaagatgtagagtttttaccacctcaacttccaagtgataaattcaaggatgatccagttggaccttttggacaggaaagtgtaacatcagttacagagttaatggtgcaatgtaagaaacctttaaaagtttctgatgaattagtgcagcaatatcaaattaaaaaccagtgtctttcagcaatagcatctgatgcagaacaagaacctaaaattgatccatatgcatttgttgaaggagatgaggaattcctttttcctgataaaaaagatagacaaaatagtgagagagaagctggaaaaaaacacaaggtagaagatgggacatctagtgtaacagtgttatcacatgaagaagatgctatgtcattatttagtccctctatcaagcaagatgctccacgccctactagtcatgcccgtcctccatcaacaagtttgatttatgactcagacctggctgtctcttatactgaccttgataatctcttcaattctgatgaagatgaactaacacctggatctaaaaaatcagcaaatggatcagatgataaagccagctgcaaggaatcaaagacaggaaatctggacccgttatcttgcataagcactgcagatcttcataaaatgtatcctacaccaccatcattggaacaacatattatgggattttccccaatgaatatgaataataaagaatatggtagtatggatacaacacctggaggaactgttctagaaggaaatagttctagtataggagcgcagttcaaaattgaggttgatgagggattctgtagccccaaaccttctgaaattaaagatttttcttatgtctataagcctgaaaattgtcaaattctagtgggatgttccatgtttgcacctctaaaaactctaccaagccaatatctgccccctatcaaattgccagaagagtgtatttaccgtcagagttggactgttggaaaattggaattgctttcttcagggccttcaatgccattcatcaaagagggtgatggaagtaatatggatcaagaatatggcactgcttatacacctcaaactcatacttcttttgggatgcctcctagcagtgcacctcctagtaacagcggagcaggaattcttccttctccatccacccctcggtttccaactccaaggactccaaggactcctcggactcctcgtggagctggtggacctgctagtgctcaaggttcagtcaaatatgaaaattcagacttgtattcaccagcttctaccccatctacatgcagaccccttaattctgttgaacctgcaactgtcccttccatccctgaagcacacagtctttatgtaaacctcatcctttcagaatcagttatgaatttgtttaaagactgtaactttgatagttgttgcatctgtgtttgcaacatgaacatcaagggtgccgatgttggagtttacattccagatccaacgcaggaagcacaatataggtgtacctgtggcttcagtgctgtcatgaacagaaaatttggaaacaattcaggattatttcttgaagatgaactagatatcataggacgcaatacagactgtggcaaagaagcagaaaaacgttttgaagctctcagggctacctctgctgaacatgttaatggaggactaaaggaatctgaaaaattatctgatgatttgatattattgctacaagatcagtgcactaatttattttcaccctttggagcagcagaccaagatccttttcctaaaagtggtgtaattagcaattgggtacgtgttgaagagcgtgactgttgcaatgactgctaccttgcattagaacatgggcgtcagttcatggataacatgtcaggaggaaaagttgatgaagcacttgtgaaaagttcatgcttacacccctggtccaaaagaaacgatgtgagtatgcagtgctcacaggatatacttcgaatgctcctctctcttcagccagttcttcaggatgccattcagaaaaaaagaacagtaagaccttggggtgttcagggtcctctcacttggcaacaatttcataaaatggctggccgaggctcttatggaactgatgaatccccagaaccactgccaatccccacatttttgttgggttatgattatgattatctggtgctttctccatttgctcttccttattgggagagacttatgctggaaccctatggatctcaaagagatatagcctatgttgtactgtgtccagaaaatgaagccttgttaaatggagcaaaaagcttttttagagatcttactgcaatatatgagtcctgtcgattaggtcaacatagacctgtttctcgactgttaacagatgggatcatgagagttggatctactgcatcaaagaaactatcagaaaagttggtagcagaatggttttctcaggcagctgacggtaacaatgaagcattttctaaactcaagctttatgcacaagtctgcagatatgacctaggtccttatcttgcttccctgccattggacagctctctactttcccagccaaatttagttgcccctacaagtcagtctttgattactccacctcagatgacaaatactggaaatgctaatactccatctgccaccttagcatctgcagcgagcagcactatgacagtgacttcaggtgttgccatatctacttcagttgccacagctaattcaactttgaccacagcttcaacttcatcttcatcatcctccaacttgaatagtggagtatcatcaaataaactaccttcgtttccaccctttggcagtatgaacagtaatgctgcaggatccatgtctacacaagcaaatacagttcagagtggtcagctaggagggcaacagacatcagctctacagacagctgggatttctggagaatcatcttcacttcccactcagccgcatcctgatgtgtctgaaagcacgatggatcgggataaagtgggaatccccacagatggtgattcacatgcagtcacgtatccacctgcaattgttgtttatataattgatccttttacatacgaaaatacagacgagagcactaactcttctagtgtgtggacattggggctacttcgatgctttctagaaatggtccagactcttcctcctcatatcaagagtactgtttctgtacagattattccttgtcagtacctgttgcaacctgtgaagcatgaagatagagaaatctatccccagcatttaaaatccctggctttttcggcctttacccagtgtcggaggccacttccaacatcaaccaatgtgaaaacattgactggctttggtccaggtttagccatggaaactgcccttagaagtcctgatagaccagagtgtattcgactttatgcacctccttttattctggctccagtgaaggacaaacagacagagctaggagaaacatttggagaagctggacagaaatataatgttctttttgtgggatactgtttatcacatgatcaaaggtggattcttgcatcttgcacagatctatatggagaacttttagaaacttgtatcattaacatcgatgttccaaatagggctcgtcggaaaaaaagttctgctagaaaatttggtctacagaaactttgggagtggtgcttaggacttgtacaaatgagttcattgccatggagagttgtaattggtcgtctaggaaggattggtcatggagaattgaaagattggagctgtttgctgagtcgtcgaaacttgcagtctctaagtaaaaggctcaaagacatgtgtagaatgtgtggtatatctgctgcagactcccctagcattctcagtgcttgcttggtggcaatggagccgcaaggctcttttgttattatgccagattctgtgtcaactggttctgtatttggaagaagcacgactctaaatatgcagacatctcagctaaataccccacaggatacatcatgtactcatatacttgtgtttcctacttctgcttctgtgcaagtagcttcagctacttataccactgaaaatttggatttagctttcaatcccaacaatgatggagcagatggaatgggtatctttgatttgttagacacaggagatgatcttgaccctgatatcattaatatccttcctgcttctccaactggttctcctgtacattctccaggatctcattacccccatggaggtgatgcgggcaagggtcagagtactgatcggctactatcaacagaacctcatgaggaagtacctaatattcttcagcaaccattggcccttggttactttgtatcaactgccaaagcaggtccattacctgactggttctggtcagcatgtcctcaagcacaatatcagtgtcccctttttcttaaggcctctttgcacctccacgtgccttcagtgcaatctgacgagctgcttcacagtaaacactcccacccacttgactcaaatcagacttcagatgtcctcaggtttgttttggaacagtacaatgcactctcctggctaacctgtgaccctgcaacccaggacagacgctcatgtctcccaattcattttgtggtgctgaatcagttatataactttattatgaatatgctgtga

SEQ ID NO: 380 - DNA, 1500 bp, Homo sapiens;
atggggcggaagaaaatacaaatcacacgcataatggatgaaaggaaccgacaggtcacttttacaaagagaaagtttggattaatgaagaaagcctatgaacttagtgtgctctgtgactgtgaaatagcactcatcattttcaacagctctaacaaactgtttcaatatgctagcactgatatggacaaagttcttctcaagtatacagaatataatgaacctcatgaaagcagaaccaactcggatattgttgaggctctgaacaagaaggaacacagagggtgcgacagcccagaccctgatacttcatatgtgctaactccacatacagaagaaaaatataaaaaaattaatgaggaatttgataatatgatgcggaatcataaaatcgcacctggtctgccacctcagaacttttcaatgtctgtcacagttccagtgaccagccccaatgctttgtcctacactaacccagggagttcactggtgtccccatctttggcagccagctcaacgttaacagattcaagcatgctctctccacctcaaaccacattacatagaaatgtgtctcctggagctcctcagagaccaccaagtactggcaatgcaggtgggatgttgagcactacagacctcacagtgccaaatggagctggaagcagtccagtggggaatggatttgtaaactcaagagcttctccaaatttgattggagctactggtgcaaatagcttaggcaaagtcatgcctacaaagtctccccctccaccaggtggtggtaatcttggaatgaacagtaggaaaccagatcttcgagttgtcatccccccttcaagcaagggcatgatgcctccactaaatacccagaggatcagtagttctcaagccactcaacctcttgctaccccagtcgtgtctgtgacaaccccaagcttgcctccgcaaggacttgtgtactcagcaatgccgactgcctacaacactgattattcactgaccagcgctgacctgtcagcccttcaaggcttcaactcgccaggaatgctgtcgctgggacaggtgtcggcctggcagcagcaccacctaggacaagcagccctcagctctcttgttgctggagggcagttatctcagggttccaatttatccattaataccaaccaaaacatcagcatcaagtccgaaccgatttcacctcctcgggatcgtatgaccccatcgggcttccagcagcagcagcagcagcagcagcagcagcagccgccgccaccaccgcagccccagccacaacccccgcagccccagccccgacaggaaatggggcgctcccctgtggacagtctgagcagctctagtagctcctatgatggcagtgatcgggaggatccacggggcgacttccattctccaattgtgcttggccgacccccaaacactgaggacagagaaagcccttctgtaaagcgaatgaggatggacgcgtgggtgacctaa

SEQ ID NO: 381 - DNA, 1743 bp, Homo sapiens;
atgtcggacacgtggagctctatccaggcccacaagaagcagctggactctctgcgggagaggctgcagcggaggcggaagcaggactcggggcacttggatctacggaatccagaggcagcattgtctccaaccttccgtagtgacagcccagtgcctactgcacccacctctggtggccctaagcccagcacagcttcagcagttcctgaattagctacagatcctgagttagagaagaagttgctacaccacctctctgatctggccttaacattgcccactgatgctgtgtccatctgtcttgccatctccacgccagatgctcctgccactcaagatggggtagaaagcctcctgcagaagtttgcagctcaggagttgattgaggtaaagcgaggtctcctacaagatgatgcacatcctactcttgtaacctatgctgaccattccaagctctctgccatgatgggtgctgtggcagaaaagaagggccctggggaggtagcagggactgtcacagggcagaagcggcgtgcagaacaggactcgactacagtagctgcctttgccagttcgttagtctctggtctgaactcttcagcatcggaaccagcaaaggagccagccaagaaatcaaggaaacatgctgcctcagatgttgatctggagatagagagccttctgaaccaacagtccactaaggaacaacagagcaagaaggtcagtcaggagatcctagagctattaaatactacaacagccaaggaacaatccattgttgaaaaatttcgctctcgaggtcgggcccaagtgcaagaattctgtgactatggaaccaaggaggagtgcatgaaagccagtgatgctgatcgaccctgtcgcaagctgcacttcagacgaattatcaataaacacactgatgagtctttaggtgactgctctttccttaatacatgtttccacatggatacctgcaagtatgttcactatgaaattgatgcttgcatggattctgaggcccctggcagcaaagaccacacgccaagccaggagcttgctcttacacagagtgtcggaggtgattccagtgcagaccgactcttcccacctcagtggatctgttgtgatatccgctacctggacgtcagtatcttgggcaagtttgcagttgtgatggctgacccaccctgggatattcacatggaactgccctatgggaccctgacagatgatgagatgcgcaggctcaacatacccgtactacaggatgatggctttctcttcctctgggtcacaggcagggccatggagttggggagagaatgtctaaacctctgggggtatgaacgggtagatgaaattatttgggtgaagacaaatcaactgcaacgcatcattcggacaggccgtacaggtcactggttgaaccatgggaaggaacactgcttggttggtgtcaaaggaaatccccaaggcttcaaccagggtctggattgtgatgtgatcgtagctgaggttcgttccaccagtcataaaccagatgaaatctatggcatgattgaaagactatctcctggcactcgcaagattgagttatttggacgaccacacaatgtgcaacccaactggatcacccttggaaaccaactggatgggatccacctactagacccagatgtggttgcacggttcaagcaaaggtacccagatggtatcatctctaaacctaagaatttatag

SEQ ID NO: 382 - DNA, 2208 bp, Homo sapiens;
atggcggctggcggagctgtcgctgcggcgcccgagtgccggcttctcccctacgcgctacacaagtggagctccttttcctccacctaccttcccgagaacattttagtggacaaaccaaatgaccaatcttcaagatggtcttcagagagcaactatcctccccagtacttgattctaaagctcgaaaggcctgctatagttcagaatatcacatttggaaaatatgagaaaactcatgtttgcaatttgaagaaatttaaagtctttggtggaatgaatgaagaaaatatgacagagctgttgtccagtggcttaaagaatgattataacaaagaaacattcaccttgaagcataaaattgatgaacagatgttcccttgtcgattcattaaaatagttccactcttgtcctggggacccagctttaactttagcatctggtatgttgaacttagtggcattgatgatcctgatatagtacaaccttgtctcaactggtatagcaagtaccgtgaacaggaagctattcgcctttgcctaaaacacttcagacaacacaactatacagaagcttttgagtcactgcaaaagaaaaccaagattgcactggaacatcccatgttaacagatattcatgacaagctggtgttgaagggtgattttgatgcttgcgaagagttgattgaaaaggctgtaaatgatggcttgttcaatcagtatatcagtcaacaggaatataagccacgatggagtcaaatcattcccaaaagtaccaaaggtgatggggaagataaccgtccaggaatgagaggaggccatcagatggttattgatgttcaaacagagactgtttatttgtttggtggctgggatggaacacaagatcttgctgacttctgggcgtacagtgtgaaggagaaccagtggacatgtatctctagagacactgaaaaagagaatggtcctagtgccagatcgtgtcataaaatgtgcattgatattcaacggaggcaaatctacacattggggcgttacttggattcctctgtgaggaacagcaaatctctgaaaagtgacttctatcgttatgacattgatacaaacacatggatgttactaagtgaggatactgctgctgatggagggccgaaattggtgtttgatcatcagatgtgtatggactcagaaaaacatatgatctacacttttggtggtagaattttgacttgtaatggcagcgtagatgacagcagagccagtgaaccacaattcagtggcttgtttgctttcaactgtcaatgtcaaacctggaaacttcttcgagaggactcctgtaatgctgggcctgaggacatccagtctcgaataggacactgcatgttattccactcaaaaaatcgttgcttatatgtatttggtggccagcgatcaaagacctatttgaatgatttctttagttatgatgtggactctgatcatgtagacataatatcagatggcaccaagaaagactctgggatggttccaatgacaggatttacacagagagcaactattgatccagaactgaatgaaatacacgtcttatctggactcagcaaagataaggaaaagagggaagaaaatgttagaaattcattctggatttatgacattgtgaggaatagttggtcttgtgtctataagaatgatcaagctgcaaaggataatccaactaaaagtcttcaggaagaagaaccatgtccaaggtttgcccatcagcttgtatacgatgagctacacaaggttcattacttatttggtgggaatccaggaaaatcttgctctccaaagatgagattagatgacttctggtcactgaagttgtgtagaccttcaaaagattatttactgaggcattgcaagtacctcataagaaaacacaggtttgaagaaaaggcccaagtggatccccttagtgctctgaaatatttacaaaatgatctttatataactgtggatcattcagacccagaagagacaaaagagtttcagctcctggcatcagctctattcaaatctggttcagattttacagctctgggcttttctgatgtggatcacacctatgctcaaagaactcagctctttgacaccttagtaaatttctttcctgacagcatgactcctcctaaaggcaacctggtagacctcatcacactgtaa

SEQ ID NO: 383 - DNA, 1449 bp, Homo sapiens;
atggcggaggctgcaactcccggaacaacagccacaacatcaggagcaggagcggcagcggcgacggcggcagcagcctcccccaccccgatccccacagtcaccgccccgtccctgggggcgggcggagggggcggcggcagcgacggcagcggcggcggctggactaaacaggtcacctgcaggtattttatgcatggggtttgtaaggaaggagacaactgtcgctactcgcatgacctctctgacagtccgtatagtgtagtgtgcaagtattttcagcgagggtactgtatttatggagaccgctgcagatatgaacatagcaaaccattgaaacaggaagaagcaactgctacagagctaactacaaagtcatcccttgctgcttcctcaagtctctcatcgatagttggaccacttgttgaaatgaatacaggcgaagctgagtcaagaaattcaaactttgcaactgtaggagcaggttcagaggactgggtgaatgctattgagtttgttcctgggcaaccctactgtggccgtactgcgccttcctgcactgaagcacccctgcagggctcagtgaccaaggaagaatcagagaaagagcaaaccgccgtggagacaaagaagcagctgtgcccctatgctgcagtgggagagtgccgatacggggagaactgtgtgtatctccacggagattcttgtgacatgtgtgggctgcaggtcctgcatccaatggatgctgcccagagatcgcagcatatcaaatcgtgcattgaggcccatgagaaggacatggagctctcatttgccgtgcagcgcagcaaggacatggtgtgtgggatctgcatggaggtggtctatgagaaagccaaccccagtgagcgccgcttcgggatcctctccaactgcaaccacacctactgtctcaagtgcattcgcaagtggaggagtgctaagcaatttgagagcaagatcataaagtcctgcccagaatgccggatcacatctaactttgtcattccaagtgagtactgggtggaggagaaagaagagaagcagaaactcattctgaaatacaaggaggcaatgagcaacaaggcgtgcaggtattttgatgaaggacgtgggagctgcccatttggagggaactgtttttacaagcatgcgtaccctgatggccgtagagaggagccacagagacagaaagtgggaacatcaagcagataccgggcccaacgaaggaaccacttctgggaactcattgaggaaagagagaacagcaacccctttgacaacgatgaagaagaggttgtcacctttgagctgggcgagatgttgcttatgcttttggctgcaggtggggacgacgaactaacagactctgaagatgagtgggacttgtttcatgatgagctggaagatttttatgacttggatctatag

SEQ ID NO: 384 - DNA, 1689 bp, Homo sapiens;
atgcggctgcggctccggcttctggcgctgctgcttctgctgctggcaccgcccgcgcgcgccccgaagccctcggcgcaggacgtgagcctgggcgtggactggctgactcgctatggttacctgccgccaccccaccctgcccaggcccagctgcagagccctgagaagttgcgcgatgccatcaaagtcatgcagaggttcgcggggctgccggagaccggccgcatggacccagggacagtggccaccatgcgtaagccccgctgctccctgcctgacgtgctgggggtggcggggctggtcaggcggcgtcgccggtacgctctgagcggcagcgtgtggaagaagcgaaccctgacatggagggtacgttccttcccccagagctcccagctgagccaggagaccgtgcgggtcctcatgagctatgccctgatggcctggggcatggagtcaggcctcacatttcatgaggtggattccccccagggccaggagcccgacatcctcatcgactttgcccgcgccttccaccaggacagctaccccttcgacgggttggggggcaccctagcccatgccttcttccctggggagcaccccatctccggggacactcactttgacgatgaggagacctggacttttgggtcaaaagacggcgaggggaccgacctgtttgccgtggctgtccatgagtttggccacgccctgggcctgggccactcctcagcccccaactccattatgaggcccttctaccagggtccggtgggcgaccctgacaagtaccgcctgtctcaggatgaccgcgatggcctgcagcaactctatgggaaggcgccccaaaccccatatgacaagcccacaaggaaacccctggctcctccgccccagcccccggcctcgcccacacacagcccatccttccccatccctgatcgatgtgagggcaattttgacgccatcgccaacatccgaggggaaactttcttcttcaaaggcccctggttctggcgcctccagccctccggacagctggtgtccccgcgacccgcacggctgcaccgcttctgggaggggctgcccgcccaggtgagggtggtgcaggccgcctatgctcggcaccgagacggccgaatcctcctctttagcgggccccagttctgggtgttccaggaccggcagctggagggcggggcgcggccgctcacggagctggggctgcccccgggagaggaggtggacgccgtgttctcgtggccacagaacgggaagacctacctggtccgcggccggcagtactggcgctacgacgaggcggcggcgcgcccggaccccggctaccctcgcgacctgagcctctgggaaggcgcgcccccctcccctgacgatgtcaccgtcagcaacgcaggtgacacctacttcttcaagggcgcccactactggcgcttccccaagaacagcatcaagaccgagccggacgccccccagcccatggggcccaactggctggactgccccgccccgagctctggtccccgcgcccccaggccccccaaagcgacccccgtgtccgaaacctgcgattgtcagtgcgagctcaaccaggccgcaggacgttggcctgctcccatcccgctgctcctcttgcccctgctggtggggggtgtagcctcccgctga

SEQ ID NO: 385 - DNA, 2820 bp, Homo sapiens;
atggcggcgcagccaccccgcgggatacgcctcagcgcgctttgcccgaagtttttacatacaaattctactagtcacacctggccattcagtgcagttgctgaattaatagataatgcttatgatcctgatgtgaacgctaaacaaatatggattgacaaaacagtgataaatgaccatatatgcttgacattcaccgacaatgggaatggtatgacttctgataaattacataaaatgctaagctttggcttcagtgacaaagtcaccatgaatggtcatgtcccagttggattatatgggaatggcttcaagtcgggttctatgcgtctgggtaaagacgcaatcgtttttaccaaaaatggagaaagcatgagcgtgggccttttgtctcagacctacttggaagtcataaaagcggagcatgttgttgttccaatagtggcattcaacaagcaccgacagatgattaatttagcagaatcaaaagccagccttgctgcaattctggaacattctctgttttccacggaacagaagttactggcagaacttgatgctattataggcaagaaggggacgaggatcatcatttggaatcttagaagctacaaaaatgcaacagagttcgattttgaaaaggataaatatgatatcagaattcccgaggatttagatgagataacagggaagaaggggtacaagaagcaggaaaggatggaccagattgcccctgagagtgactattccctgagggcttattgcagtatattatatctaaagccaagaatgcagatcatcctacgtggacagaaagtgaagacacagctggtttcgaagagtcttgcctacatcgaacgtgatgtttatcgaccaaaatttttatctaaaacagtgagaattacctttggattcaactgcagaaataaagatcattatgggataatgatgtatcacagaaatagactcatcaaagcttatgaaaaagttggatgtcagttaagggcaaacaacatgggtgttggagtggttggaattatagagtgtaatttccttaagccaactcataataaacaagatttcgactatactaatgagtacagacttacaataacagcactaggagaaaagctgaatgattactggaatgaaatgaaagtgaagaaaaatacagaatatcctctaaatttgccagttgaagatatacagaagcgtcctgatcagacatgggttcagtgtgatgcctgtctaaagtggcggaaattacctgatgggatggatcaacttcctgaaaaatggtattgctccaataaccctgacccacagttcagaaattgtgaggttccagaagaacctgaagatgaggatttggtacatcccacttatgaaaaaacctacaaaaagaccaacaaggaaaaattcaggatcagacaaccggaaatgatccctcggattaatgctgaactgttgtttcggccaactgctctttcaactccaagcttttcttctcctaaggaaagtgttccaagaagacatctttcagaaggaacaaattcttatgcgacaagacttctaaataatcatcaagttccacctcagtctgaacctgagagcaacagcttgaaacggagactttctactcgttcctcaattttgaatgcaaagaatcggagattgagtagtcagtttgaaaattcagtttataaaggtgatgatgatgatgaagatgtcatcatcttagaagaaaacagtacccccaaacctgcagtagatcatgatattgacatgaaatcagaacagagtcacgttgagcaaggtggtgttcaggttgagtttgtgggtgacagtgaaccttgtggccagactggttcaacaagcacctcatcatcccgatgcgaccagggaaatactgcagctacccagactgaagtaccaagtttagttgttaaaaaagaagaaactgttgaagacgagatagacgtaagaaatgatgcagtgattctgccctcctgtgtagaagctgaagcaaagatacatgaaacccaggaaaccaccgataaatctgcagatgatgcaggctgccaattacaagaactgagaaaccagctactccttgtcactgaggaaaaagagaattataaaagacagtgtcatatgtttactgatcaaatcaaagtgttacaacagaggatactagaaatgaatgacaagtatgttaagaaagaaacttgccatcagtccactgaaaccgatgctgtatttttacttgaaagtattaatggcaaatctgaaagtccagaccatatggtatctcagtatcagcaagctttggaagaaatagaaaggctgaaaaaacaatgtagtgctttgcaacatgtaaaggctgaatgcagccagtgttccaataatgagagtaaaagtgaaatggatgagatggctgtgcagcttgacgatgtgtttagacaactggacaaatgcagtattgagagggaccagtataaaagtgaggttgaattgctggaaatggaaaagtcacaaatccgttcacagtgtgaagaactcaaaactgaagtagaacagttaaaatctacaaatcaacagacggcaacagatgtttcaacatcaagtaacattgaggagtctgtaaatcatatggatggagaaagcctcaaactccgatctcttcgagttaacgtaggacaactgctggctatgattgtgcctgatcttgatcttcagcaagtgaattacgatgttgatgtagttgatgagattttaggacaagttgttgaacaaatgagtgaaatcagtagtacttaa

SEQ ID NO: 386 - DNA, 1557 bp, Homo sapiens;
atggcagagaatcacgcccagaataaagccaagctcatctctgagacccggaggaggttcgaagctgagtatgtgacagataagtcagataaatatgatgcacgtgatgttgaaaggctacaacaagatgataactgggttgaaagttacttatcttggagacataatattgtagatgaaacactgaagatgctcgatgagagttttcagtggaggaaagaaatttctgtcaatgaccttaatgaatcctccattcccagatggttattggaaattggtgttatttatctccatggttatgacaaagaaggtaacaaattgttctggatcagggtgaagtatcatgtaaaagaccagaaaaccatattggacaaaaagaagctcatagcattctggttggaacgttatgctaagagggaaaatgggaaacctgtaacagtgatgtttgacctgtcagaaactggaataaatagcattgacatggactttgtacgctttatcatcaactgctttaaggtttattaccctaaatacctctcaaaaatagtgatctttgatatgccttggttaatgaatgctgctttcaaaattgtgaaaacctggcttggtccagaagcagtgagcttgttgaagtttacaagcaaaaatgaagtccaggactatgtcagtgtagaatacctgcctccccacatgggtggaactgatcctttcaagtatagctatccaccactagtagatgatgacttccagaccccactgtgtgagaatgggcctattaccagtgaggatgaaacttcaagtaaagaagacatagaaagtgatggcaaagaaacattggaaacaatttctaatgaagaacaaacacctcttcttaaaaagattaacccaaccgaatctacttccaaagcagaagaaaatgaaaaagttgattcaaaagtgaaagctttcaagaaaccattgagtgtatttaaaggccccttactacacatcagcccagcagaagaactgtactttggaagtacagaatccggagagaagaaaaccttaatagtgttgacaaatgtaactaaaaatatagtggcatttaaggtgagaacaacagctccagaaaaatacagagtcaagccaagcaatagcagctgtgacccgggtgcatcagtggatatagttgtgtctccccatgggggtttaacagtctctgcccaagaccgttttctgataatggctgcagaaatggaacagtcatctggcacaggcccagcagaattaactcagttttggaaagaagttcccagaaacaaagtgatggaacataggttaagatgccatactgttgaaagcagtaaaccaaacactcttacgttaaaagacaatgctttcaatatgtcagataaaaccagtgaagatatatgtctacaactcagtcgtttactagaaagcaataggaagcttgaagaccaagttcagcgttgtatctggttccagcagctgctgctttccttaacaatgctcttgcttgcttttgtcacctctttcttctatttattgtacagttaa

SEQ ID NO: 387 - DNA, 1191 bp, Homo sapiens;
atggcgatgatcgaattggggtttggaagacagaattttcatccattaaagaggaagagttcattgctgttgaaactcatagctgttgtctttgctgtgcttctattttgtgaatttttaatctattacttagcgatctttcagtgtaattggcctgaagtgaaaaccacagcctctgatggtgaacagaccacacgtgagcctgtgctcaaagccatgtttttggctgacacccatttgcttggggaattcctaggccactggctggacaaattacgaagggaatggcagatggagagagcgttccagacagctctgtggttgctgcagccggaagtcgtcttcatcctgggggatatctttgatgaagggaagtggagcacccctgaggcctgggcggatgatgtggagcggtttcagaaaatgttcagacacccaagtcatgtacagctgaaggtagttgctggaaaccatgacattggcttccattatgagatgaacacatacaaagtagaacgctttgagaaagtgttcagctctgaaagactgttttcttggaaaggcattaactttgtgatggtcaacagcgtggcgctgaacggggatggctgtggcatctgctctgaaacagaagcagagctcattgaagtttctcacagactgaactgctcccgagaggcacgtggctccagccggtgtggacctgggcctctgctgcccacgtctgcccctgtcctcctgcagcattatcctctgtatcggagaagtgatgctaactgttctggggaagacgctgctcctgcagaggaaagggacatcccatttaaggagaactatgacgtgctttcacgggaggcatcacaaaagctgctgtggtggctccagccgcgcctggttctcagtggccacacgcacagcgcctgcgaggtgcaccacgggggccgagtccccgagctcagcgtcccatctttcagttggaggaacagaaacaaccccagtttcatcatgggtagcatcacgcccacagactacaccctctccaagtgctacctcccacgtgaggatgtggttttgatcatctactgtggagtggtgggcttccttgtggtcctcacactcactcactttgggcttctagcctcaccttttctttctggtttgaacttgctcggaaagcgtaagacaagatga

SEQ ID NO: 388 - DNA, 1056 bp, Homo sapiens;
atggaaaggcggatgcagctggtaaagaaggataacgagaaagaaaggcacaagctgtttcagggctatgaaactgaagagagagaggaaacagagctatctgagaaaattaaactggagtgccagccggagctttccgagacatcccagactctgcctcccaagcccttctcatgtgggcggagtggaaagggacataaaaggaaatccccatttggaagtacagaaagaaagactcctgttaaaaagctggctcctgaattttcaaaagtcaaaacaaaaactcctaagcactctcctattaaagaggaaccctgtggttccttatctgaaactgtttgtaaacgtgaattgaggagccaagaaaccccagaaaagccccggtcttcagtggacaccccaccaagactctccactccccaaaagggacccagcacccatcccaaggagaaagccttctcaagtgagatagaagatttgccgtacctttccaccacagaaatgtatttgtgtcgttggcaccagcctcccccatcaccgttaccattacgggaatcctctccaaagaaggaggagactgtagcaaggtgtctgatgccatcaagtgttgcaggagaaacttcagtcttggctgttccttcttggagggaccactcagtagagcctctaagggacccaaatccttcagaccttttggagaacctggatgacagtgtgttttcgaagcggcatgcaaaactggagctggatgagaagagaaggaaaagatgggatattcagaggatcagggaacaaagaattttacagcgactgcagctcagaatgtataaaaagaaaggaattcaggaatctgagcctgaggttacctcatttttccctgagccagatgatgttgaaagtttgatgattacccccttcttgcctgttgtagcatttggacgaccattaccaaaattaactccacagaattttgagctaccctggttggatgagcgtagccgatgcagattggagatccagaagaagcaaacacctcaccggacgtgtaggaaatag

SEQ ID NO: 389 - DNA, 3597 bp, Homo sapiens;
atggatgaagagactcggcacagccttgagtgcatccaggccaatcagatctttcccaggaagcagctgatccgggaggatgagaatcttcaggttcctttccttgaacttcatggagagagcacagagtttgtgggccgtgccgaggatgccatcattgccctttccaattacagacttcacatcaagttcaaggagtctcttgttaatgttccattacagcttatagaaagtgttgaatgccgagatatatttcagcttcatttgacttgcaaagactgcaaagttatcaggtgtcagttttcaacctttgagcagtgtcaagagtggctgaagagactgaacaacgcaatccgaccacctgctaaaatagaagatctcttctcatttgcataccatgcttggtgcatggaggtctatgccagtgaaaaagagcaacatggagacctgtgcagaccaggggagcatgtaacttcaaggtttaaaaacgaggtggagaggatgggttttgatatgaacaacgcctggaggatttccaacatcaatgagaagtacaaattatgtggtagctatcctcaagagctcatagtgcctgcctggatcactgacaaagaactggaaagtgtatcaagtttcaggtcctggaagcgcatccctgccgtcatctacaggcaccagagcaatggagctgtcattgcccgctgtggacagccagaggttagctggtggggctggcgaaatgcagatgatgagcatctggtacagtcagtagccaaagcttgtgcctctgactcccgatcgagtggcagcaagctgtcaactaggaacacttctcgagactttcccaatgggggagacctttctgacgtggagttcgattcttctctgtcaaatgcttcaggagcagagagtttagccatccaaccgcagaagcttttgatcttggatgcacgctcctatgcagctgctgtggcaaaccgagccaaaggaggaggctgcgaatgcccagagtattacccaaactgtgaagttgtgtttatggggatggcaaacattcattctattcggaggagttttcagtctctgcggttgctgtgcactcagatgccagatccgggaaattggctatcagctcttgaaagcacaaaatggctccatcacttgtctgtgcttctgaaatcagcgcttctggtagtgcatgctgtggatcaggatcagcggccggtgctagtacactgctcagatggctgggaccgcaccccccagattgtggcattggctaagctcttgctggacccttattaccgaaccatagagggtttccaggtcctcgtggaaatggagtggctggattttggccataaatttgctgaccggtgtggtcatggggagaactcggatgatctgaatgaacgttgcccagtgtttctgcagtggcttgactgtgttcatcagcttcagaggcaatttccttgctcttttgagttcaatgaagcattccttgtgaaactggtgcagcatacctattcctgcctgtttggaacattcctgtgcaacaacgccaaggagagaggggaaaagcatactcaggaacggacatgttccgtgtggtcacttcttcgggcaggcaacaaggctttcaaaaacctactgtattcctctcagtcagaagccgtgctgtaccctgtgtgccatgtgcgtaacctgatgctgtggagtgcagtgtacctgccctgcccatccccaaccacccctgtggacgacagctgtgcaccatacccagccccaggcaccagccctgatgatccccccctgagccggctaccaaagactagatcatacgacaatctgaccacagcctgtgacaacacagtgcctctggccagccggcgctgcagcgaccccagcctgaacgagaagtggcaggagcaccggcgctcactagagctgagcagcctggctggccctggagaggatcccctttctgccgacagcctagggaagcccaccagagtgccggggggtgccgagctttctgttgcagccggagtagctgaggggcagatggagaacatcttgcaggaggccaccaaagaggagagtggagtagaggaacctgcccacagggcaggcattgagatacaggagggtaaagaggaccctctcttagaaaaggagagcaggaggaagacacctgaggcctcagccattggacttcaccaagacccagaactgggtgatgctgctctgaggagccatctggatatgagctggcctctgttctcacagggcatttctgaacagcagagtgggctcagtgttctcctcagttctctccaggtcccccccaggggagaggattccctggaggtccctgtggagcagtttcgaatagaagagattgcagagggtagggaggaagcagttcttccaatcccagtagatgcaaaagttggctatggtacctcacagtcatgttctctgctaccttcccaagtcccttttgagaccagaggaccaaacgtggacagttctacagacatgttagtggaagataaggtgaagtcagtaagtgggccccaaggtcatcatagatcttgccttgtaaatagtggcaaggacaggcttcctcagaccatggaacccagcccttcagagacaagcctggtcgagaggccccaagtggggtctgtggtgcataggacttcccttggcagcactctcagcctgacacgttccccttgtgccttgcctttagccgaatgtaaagaggggcttgtgtgcaatggtgccccagagactgaaaacagggcctcagagcagcccccaggtcttagcaccctccagatgtaccccacacccaatgggcattgcgccaatggggaggctggtaggagcaaggactcactgagccgtcagctgtctgctatgagctgcagctctgcccacttacactcaaggaacttgcaccacaagtggctgcatagccactcaggaaggccatctgcaaccagcagccccgaccagccttcccgcagccacctggacgatgatggcatgtcagtgtacacagacacgatccaacagcgcctgcgtcagattgagtcaggccaccagcaggaagtagaaactttgaagaaacaagtccaggagctgaagagtcgcctggagagccagtacctgaccagctccctacactttaatggagactttggggatgaggtgacttcaatccccgactcggaaagcaatctggatcagaactgtttgtctcgctgcagcacagagattttctctgaagccagctgggagcaggtggataaacaggacacagagatgacccgttggcttcctgaccacctggccgcccactgctatgcgtgcgacagtgccttctggcttgccagcaggaagcaccactgcaggaattgtgggaacgtattctgctccagttgttgtaaccagaaggttccagttcccagccagcagctctttgaacccagtcgagtatgcaagtcttgctatagcagcctacatcccacaagctccagcattgaccttgaactggataagcccattgctgccacttccaactga

SEQ ID NO: 390 - DNA, 1989 bp, Homo sapiens;
atggttgtttccgaagtggacatcgcaaaagctgatccagctgctgcatcccaccctctattactgaatggagatgctactgtggcccagaaaaatccaggctcggtggctgagaacaacctgtgcagccagtatgaggagaaggtgcgcccctgcatcgacctcattgactccctgcgggctctaggtgtggagcaggacctggccctgccagccatcgccgtcatcggggaccagagctcgggcaagagctccgtgttggaggcactgtcaggagttgcccttcccagaggcagcgggatcgtgaccagatgcccgctggtgctgaaactgaagaaacttgtgaacgaagataagtggagaggcaaggtcagttaccaggactacgagattgagatttcggatgcttcagaggtagaaaaggaaattaataaagcccagaatgccatcgccggggaaggaatgggaatcagtcatgagctaatcaccctggagatcagctcccgagatgtcccggatctgactctaatagaccttcctggcataaccagagtggctgtgggcaatcagcctgctgacattgggtataagatcaagacactcatcaagaagtacatccagaggcaggagacaatcagcctggtggtggtccccagtaatgtggacatcgccaccacagaggctctcagcatggcccaggaggtggaccccgagggagacaggaccatcggaatcttgacgaagcctgatctggtggacaaaggaactgaagacaaggttgtggacgtggtgcggaacctcgtgttccacctgaagaagggttacatgattgtcaagtgccggggccagcaggagatccaggaccagctgagcctgtccgaagccctgcagagagagaagatcttctttgagaaccacccatatttcagggatctgctggaggaaggaaaggccacggttccctgcctggcagaaaaacttaccagcgagctcatcacacatatctgtaaatctctgcccctgttagaaaatcaaatcaaggagactcaccagagaataacagaggagctacaaaagtatggtgtcgacataccggaagacgaaaatgaaaaaatgttcttcctgatagataaagttaatgcctttaatcaggacatcactgctctcatgcaaggagaggaaactgtaggggaggaagacattcggctgtttaccagactccgacacgagttccacaaatggagtacaataattgaaaacaattttcaagaaggccataaaattttgagtagaaaaatccagaaatttgaaaatcagtatcgtggtagagagctgccaggctttgtgaattacaggacatttgagacaatcgtgaaacagcaaatcaaggcactggaagagccggctgtggatatgctacacaccgtgacggatatggtccggcttgctttcacagatgtttcgataaaaaattttgaagagttttttaacctccacagaaccgccaagtccaaaattgaagacattagagcagaacaagagagagaaggtgagaagctgatccgcctccacttccagatggaacagattgtctactgccaggaccaggtatacaggggtgcattgcagaaggtcagagagaaggagctggaagaagaaaagaagaagaaatcctgggattttggggctttccagtccagctcggcaacagactcttccatggaggagatctttcagcacctgatggcctatcaccaggaggccagcaagcgcatctccagccacatccctttgatcatccagttcttcatgctccagacgtacggccagcagcttcagaaggccatgctgcagctcctgcaggacaaggacacctacagctggctcctgaaggagcggagcgacaccagcgacaagcggaagttcctgaaggagcggcttgcacggctgacgcaggctcggcgccggcttgcccagttccccggttaa

SEQ ID NO: 391 - DNA, 687 bp, Homo sapiens;
atggagcgggtgaagatgatcaacgtgcagcgtctgctggaggctgccgagtttttggagcgccgggagcgagagtgtgaacatggctacgcctcttcattcccgtccatgccgagcccccgactgcagcattcaaagcccccacggaggttgagccgggcacagaaacacagcagcgggagcagcaacaccagcactgccaacagatctacacacaatgagctggaaaagaatcgacgagctcatctgcgcctttgtttagaacgcttaaaagttctgattccactaggaccagactgcacccggcacacaacacttggtttgctcaacaaagccaaagcacacatcaagaaacttgaagaagctgaaagaaaaagccagcaccagctcgagaatttggaacgagaacagagatttttaaagtggcgactggaacagctgcagggtcctcaggagatggaacgaatacgaatggacagcattggatcaactatttcttcagatcgttctgattcagagcgagaggagattgaagtggatgttgaaagcacagagttctcccatggagaagtggacaatataagtaccaccagcatcagtgacattgatgaccacagcagcctgccgagtattgggagtgacgagggttactccagtgccagtgtcaaactttcattcacttcatag

SEQ ID NO: 392 - DNA, 1365 bp, Homo sapiens;
ctggatttttttcgggtagtggaaaaccagcagcctcccgcgacgatgcccctcaacgttagcttcaccaacaggaactatgacctcgactacgactcggtgcagccgtatttctactgcgacgaggaggagaacttctaccagcagcagcagcagagcgagctgcagcccccggcgcccagcgaggatatctggaagaaattcgagctgctgcccaccccgcccctgtcccctagccgccgctccgggctctgctcgccctcctacgttgcggtcacacccttctcccttcggggagacaacgacggcggtggcgggagcttctccacggccgaccagctggagatggtgaccgagctgctgggaggagacatggtgaaccagagtttcatctgcgacccggacgacgagaccttcatcaaaaacatcatcatccaggactgtatgtggagcggcttctcggccgccgccaagctcgtctcagagaagctggcctcctaccaggctgcgcgcaaagacagcggcagcccgaaccccgcccgcggccacagcgtctgctccacctccagcttgtacctgcaggatctgagcgccgccgcctcagagtgcatcgacccctcggtggtcttcccctaccctctcaacgacagcagctcgcccaagtcctgcgcctcgcaagactccagcgccttctctccgtcctcggattctctgctctcctcgacggagtcctccccgcagggcagccccgagcccctggtgctccatgaggagacaccgcccaccaccagcagcgactctgaggaggaacaagaagatgaggaagaaatcgatgttgtttctgtggaaaagaggcaggctcctggcaaaaggtcagagtctggatcaccttctgctggaggccacagcaaacctcctcacagcccactggtcctcaagaggtgccacgtctccacacatcagcacaactacgcagcgcctccctccactcggaaggactatcctgctgccaagagggtcaagttggacagtgtcagagtcctgagacagatcagcaacaaccgaaaatgcaccagccccaggtcctcggacaccgaggagaatgtcaagaggcgaacacacaacgtcttggagcgccagaggaggaacgagctaaaacggagcttttttgccctgcgtgaccagatcccggagttggaaaacaatgaaaaggcccccaaggtagttatccttaaaaaagccacagcatacatcctgtccgtccaagcagaggagcaaaagctcatttctgaagaggacttgttgcggaaacgacgagaacagttgaaacacaaacttgaacagctacggaactcttgtgcgtaa

SEQ ID NO: 393 - DNA, 2691 bp, Homo sapiens;
atggcggcccgggcggtgctggacgagttcactgcgccagctgagaaggcggagctgctggagcagagccgcggccgtatcgagggcctgtttggcgtgagcctagccgtgctcggcgcgctaggggctgaggagccgctgcccgcgcgcatctggctgcagctctgcggggcgcaggaggcggtgcacagcgccaaggaatatattaaaggaatctgtgaacctgaactagaagaaagagaatgttaccccaaggacatgcactgcatttttgttggggcagagagcctgtttctgaaaagcttgattcaggatacttgtgctgacctctgcattctggacattggccttcttggcatcagaggaagtgctgaggctgtggtcatggctaggagtcacattcaacaatttgtaaagctctttgaaaataaagagaacctacccagtagtcagaaagaatcagaggtgaaaagggaattcaaacaatttgttgaagcccatgcagacaattacacaatggatttgttgattttgcccacttccttgaaaaaagaacttttgacactcacacaaggtgaggagaatctctttgaaacaggagatgatgaggttattgaaatgagagattctcaacaaacagagtttacacagaatgctgccacagggctgaatatttctagagatgaaactgttttgcaggaagaggcaagaaataaagctgggactcctgtttctgagcttacaaaacaaatggacacagtcctttctagctcaccagatgtgctttttgatccaataaatggtctaaccccagatgaagaggcactttccaatgagagaatttgtcagaaaaggagattttctgattctgaagaaaggcatacgaagaagcagttttctttggaaaatgttcaggagggggagattttacacgatgctaagacattggctggaaatgtaatagctgacctatctgattcttctgctgattctgaaaatttaagtccagatataaaagaaactactgaggaaatggaatacaacatcctcgtaaacttttttaaaaccatgggctactcccaagaaattgttgaaaaggtcattaaggtgtatggaccatctactgaaccattattgctcttagaggaaattgaaaaagaaaataaaagattccaagaagacagagaattttcagctggtacagtgtatccagagaccaacaaaaccaaaaataaaggtgtttatagcagcacaaatgagcttacaactgattccactccaaagaaaacacaggctcacacacagcaaaatatggtagaaaaattttctcagttaccattcaaagtggaagctaaaccatgtacctcaaattgtagaattaatactttcagaacagtgccaatagaacagaaacatgaagtctggggttcaaaccagaactacatttgtaacacagaccctgaaactgatggcctttcaccttctgttgcctctccaagtcccaaagaagtcaattttgtttcaaggggagcttcaagtcaccagcccagagttccactttttcctgaaaatggtttacaccagcagccagaacccttgcttccaaataatatgaaatctgcctgtgaaaaacgtttaggatgttgtagttctcctcattctaagccaaattgctcaaccctttctccaccaatgccactgccccagctgttaccttcggttactgatgcaaggtcggcaggaccttctgatcatattgattcctcagttactggggttcaaaggtttcgagatactctaaaaataccctacaagctggaattaaaaaatgaaccagggagaacggatttgaaacacattgttatagatgggagcaatgttgcaattacccatggtctgaaaaagttcttttcttgtcgtggaattgcaattgcagttgaatatttttggaagcttggcaacagaaacatcactgtatttgtccctcagtggagaacaaggcgtgatcctaatgtcacagaacagcacttcttaacccagctccaggagctcggaatattatctttaactcctgcccggatggtctttggagaaagaattgcttctcatgatgacaggtttctactacacttagcggacaaaactggtggcataattgtgacaaatgataatttcagagaatttgtgaatgagtcagtctcttggagagaaattattacaaaaaggctgctgcagtacacgttcgtgggggacatatttatggttcccgatgatcctctgggaagaagtggacctcgattagaggagtttcttcagaaggaagtctgtcttagagatatgcagcccctactcagtgccctgccaaatgtgggcatgtttgaccccagcttcagagtccctggcacccaggcagccagcaccagccaccagcctccgacccggattcagggagccccttcaagccactggctccctcagcagccccacttcccactgctgccagccctccccagtctccagcagaacctgcccatgccagctcagagatcttctgcagaaaccaacgagctgagggaagcccttctgaagatcttccctgactcagagcaaagactgaaaatagaccagatcttggtggcccacccatacatgaaagatctaaatgcgctttctgccatggtgttggattga

SEQ ID NO: 394 - DNA, 1464 bp, Homo sapiens;
atggctgcggccttacccaggaccctgggggagttgcagctgtatagaatattacaaaaagccaatctactttcttattttgatgcctttatccaacaaggtggtgatgatgtccagcaactctgtgaagcaggagaagaggagtttttggaaatcatggcactcgtgggcatggctagcaagccccttcatgttagaaggctgcagaaggctttgagagactgggtcacaaaccctgggcttttcaatcagccactgacttcccttcctgtcagtagcatacccatctataaattaccagagggatcaccaacatggctgggaatatcctgcagtagttatgaaaggagtagcaatgcccgggaacctcatttaaaaatccccaaatgtgctgccaccacctgtgtgcagagcttgggacaggggaagtcagatgtggttgggagcctagcactgcagagtgttggtgagtccagactctggcaaggccaccatgccactgagagcgagcacagcctctccccagcagacctgggctcccccgcgtccccaaaggagagcagtgaggcgctggatgctgctgctgcgctctctgtggctgagtgtgtggagcggatggcccccacactgccaaaaagtgacttgaatgaagtgaaagagctgctaaaaaccaacaagaagttggccaaaatgattggtcacatctttgagatgaacgatgatgatccacacaaagaggaggaaattcggaaatacagtgcaatatatggcagatttgactcaaagaggaaggatgggaaacatctcacacttcatgagctcactgttaatgaagcggctgctcaactctgtgtgaaggataatgccctgctgacaagaagagatgagctttttgccttggctcgacagatttctcgagaagtcacctataaatatacttacagaaccaccaagtcaaaatgtggagaaagagatgaattatccccaaagagaattaaagtggaggatgggtttccagatttccaggattctgtgcaaacactcttccagcaggctagagctaagagtgaagaacttgcagctcttagttcacagcagcctgaaaaggtgatggcaaagcagatggagttcctttgcaaccaagctggctatgagagactgcagcatgccgagaggaggttgtctgcagggctttacaggcagagctcagaagagcacagtcctaacggcttgacttccgataactcagatggacaaggagaaagacctttgaatctccgaatgcctaatttacagaacagacaaccccatcattttgtggtggatggggagctgagcagactttaccccagtgaggcaaagtcccactcatcagagagccttgggattttaaaagactaccctcattcagcttttaccttagaaaagaaagtcatcaaaacagagcctgaagattcaagatag

SEQ ID NO: 395 - DNA, 648 bp, Homo sapiens;
atgcccggcgaagccacagaaaccgtccctgctacagagcaggagttgccgcagccccaggctgagacagggtctggaacagaatctgacagtgatgaatcagtaccagagcttgaagaacaggattccacccaggcaaccacacaacaagcccagctggcggcagcagctgaaattgatgaagaaccagtcagtaaagcaaaacagagtcggagtgaaaagaaggcacggaaggctatgtccaaactgggtcttcggcaggttacaggagttactagagtcactatccggaaatctaagaatatcctctttgtcatcacaaaaccagatgtctacaagagccctgcttcagatacttacatagtttttggggaagccaagatcgaagatttatcccagcaagcacaactagcagctgctgagaaattcaaagttcaaggtgaagctgtctcaaacattcaagaaaacacacagactccaactgtacaagaggagagtgaagaggaagaggtcgatgaaacaggtgtagaagttaaggacattgaattggtcatgtcacaagcaaatgtgtcgagagcaaaggcagtccgagccctgaagaacaacagtaatgatattgtaaatgcgattatggaattaacaatgtaa

SEQ ID NO: 396 - DNA, 471 bp, Homo sapiens;
atgtcgggtggcctcctgaaggcgctgcgcagcgactcctacgtggagctgagccagtaccgggaccagcacttccggggtgacaatgaagaacaagaaaaattactgaagaaaagctgtacgttatatgttggaaatctttctttttacacaactgaagaacaaatctatgaactcttcagcaaaagtggtgacataaagaaaatcattatgggtctggataaaatgaagaaaacagcatgtggattctgttttgtggaatattactcacgcgcagatgcggaaaacgccatgcggtacataaatgggacgcgtctggatgaccgaatcattcgcacagactgggacgcaggctttaaggagggcaggcaatacggccgtgggcgatctgggggccaggttcgggatgagtatcggcaggactacgatgctgggagaggaggctatggaaaactggcacagaaccagtga

SEQ ID NO: 397 - DNA, 4326 bp, Homo sapiens;
atgagtggcctcggggacagttcatccgaccctgctaacccagactcacataagaggaaaggatcgccatgtgacacactggcatcaagcacggaaaagaggcgcagggagcaagaaaataaatatttagaagaactagctgagttactgtctgccaacattagtgacattgacagcttgagtgtaaaaccagacaaatgcaagattttgaagaaaacagtcgatcagatacagctaatgaagagaatggaacaagagaaatcaacaactgatgacgatgtacagaaatcagacatctcatcaagtagtcaaggagtgatagaaaaggaatccttgggacctcttcttttggaggctttggatggatttttctttgttgtgaactgtgaagggagaattgtatttgtgtcagagaatgtaaccagctacttaggttacaatcaggaggaattaatgaatacgagcgtctacagcatactgcacgtgggggatcatgcagaatttgtgaagaatctgctaccaaaatcactagtaaatggagttccttggcctcaagaggcaacacgacgaaatagccatacctttaactgcaggatgctaattcaccctccagatgagccagggaccgagaaccaagaagcttgccagcgttatgaagtaatgcagtgtttcactgtgtcacagccaaaatcaattcaagaggatggagaagatttccagtcatgtctgatttgtattgcacggcgattacctcggcctccagctattacgggtgtagaatcctttatgaccaagcaagatactacaggtaaaatcatctctattgatactagttccctgagagctgctggcagaactggttgggaagatttagtgaggaagtgcatttatgcttttttccaacctcagggcagagaaccatcttatgccagacagctgttccaagaagtgatgactcgtggcactgcctccagcccctcctatagattcatattgaatgatgggacaatgcttagcgcccacaccaagtgtaaactttgctaccctcaaagtccagacatgcaacctttcatcatgggaattcatatcatcgacagggagcacagtgggctttctcctcaagatgacactaattctggaatgtcaattccccgagtaaatccctcggtcaatcctagtatctctccagctcatggtgtggctcgttcatccacattgccaccatccaacagcaacatggtatccaccagaataaaccgccagcagagctcagaccttcatagcagcagtcatagtaattctagcaacagccaaggaagtttcggatgctcacccggaagtcagattgtagccaatgttgccttaaaccaaggacaggccagttcacagagcagtaatccctctttaaacctcaataattctcctatggaaggtacaggaatatccctagcacagttcatgtctccaaggagacaggttacttctggattggcaacaaggcccaggatgccaaacaattcctttcctcctaatatttcgacattaagctctcccgttggcatgacaagtagtgcctgtaataataataaccgatcttattcaaacatcccagtaacatctttacagggtatgaatgaaggacccaataactccgttggcttctctgccagttctccagtcctcaggcagatgagctcacagaattcacctagcagattaaatatacaaccagcaaaagctgagtccaaagataacaaagagattgcctcaattttaaatgaaatgattcaatctgacaacagctctagtgatggcaaacctctggattcagggcttctgcataacaatgacagactttcagatggagacagtaaatactctcaaaccagtcacaaactagtgcagcttttgacaacaactgccgaacagcagttacggcatgctgatatagacacaagctgcaaagatgtcctgtcttgcacaggcacttccaactctgcctctgctaactcttcaggaggttcttgtccctcttctcatagctcattgacagaacggcataaaattctacaccggctcttacaggagggtagcccctcagatatcaccactttgtctgtcgagcctgataaaaaggacagtgcatctacttctgtgtcagtgactggacaggtacaaggaaactccagtataaaactagaactggatgcttcaaagaaaaaagaatcaaaagaccatcagctcctacgctatcttttagataaagatgagaaagatttaagatcaactccaaacctgagcctggatgatgtaaaggtgaaagtggaaaagaaagaacagatggatccatgtaatacaaacccaaccccaatgaccaaacccactcctgaggaaataaaactggaggcccagagccagtttacagctgaccttgaccagtttgatcagttactgcccacgctggagaaggcagcacagttgccaggcttatgtgagacagacaggatggatggtgcggtcaccagtgtaaccatcaaatcggagatcctgccagcttcacttcagtccgccactgccagacccacttccaggctaaatagattacctgagctggaattggaagcaattgataaccaatttggacaaccaggaacaggcgatcagattccatggacaaataatacagtgacagctataaatcagagtaaatcagaagaccagtgtattagctcacaattagatgagcttctctgtccacccacaacagtagaagggagaaatgatgagaaggctcttcttgaacagctggtatccttccttagtggcaaagatgaaactgagctagctgaactagacagagctctgggaattgacaaacttgttcaggggggtggattagatgtattatcagagagatttccaccacaacaagcaacgccacctttgatcatggaagaaagacccaacctttattcccagccttactcttctccttctcctactgccaatctccctagccctttccaaggcatggtcaggcaaaaaccttcactggggacgatgcctgttcaagtaacacctccccgaggtgctttttcacctggcatgggcatgcagcccaggcaaactctaaacagacctccggctgcacctaaccagcttcgacttcaactacagcagcgattacagggacaacagcagttgatacaccaaaatcggcaagctatcttaaaccagtttgcagcaactgctcctgttggcatcaatatgagatcaggcatgcaacagcaaattacacctcagccacccctgaatgctcaaatgttggcacaacgtcagcgggaactgtacagtcaacagcaccgacagaggcagctaatacagcagcaaagagccatgcttatgaggcagcaaagctttgggaacaacctccctccctcatctggactaccagttcaaatggggaacccccgtcttcctcagggtgctccacagcaattcccctatccaccaaactatggtacaaatccaggaaccccacctgcttctaccagcccgttttcacaactagcagcaaatcctgaagcatccttggccaaccgcaacagcatggtgagcagaggcatgacaggaaacataggaggacagtttggcactggaatcaatcctcagatgcagcagaatgtcttccagtatccaggagcaggaatggttccccaaggtgaggccaactttgctccatctctaagccctgggagctccatggtgccgatgccaatccctcctcctcagagttctcttctccagcaaactccacctgcctccgggtatcagtcaccagacatgaaggcctggcagcaaggagcgataggaaacaacaatgtgttcagtcaagctgtccagaaccagcccacgcctgcacagccaggagtatacaacaacatgagcatcaccgtttccatggcaggtggaaatacgaatgttcagaacatgaacccaatgatggcccagatgcagatgagctctttgcagatgccaggaatgaacactgtgtgccctgagcagataaatgatcccgcactgagacacacaggcctctactgcaaccagctctcatccactgaccttctcaaaacagaagcagatggaacccagcaggtgcaacaggttcaggtgtttgctgacgtccagtgtacagtgaatctggtaggcggggacccttacctgaaccagcctggtccactgggaactcaaaagcccacgtcaggaccacagaccccccaggcccagcagaagagcctccttcagcagctactgactgaataa

SEQ ID NO: 398 - DNA, 1845 bp, Homo sapiens;
atgaataccttccaagaccagagtggcagctccagtaatagagaaccccttttgaggtgtagtgatgcacggagggacttggagcttgctattggtggagttctccgggctgaacagcaaattaaagataacttgcgagaggtcaaagctcagattcacagttgcataagccgtcacctggaatgtcttagaagccgtgaggtatggctgtatgaacaggtggaccttatttatcagcttaaagaggagacacttcaacagcaggctcagcagctctactcgttattgggccagttcaattgtcttactcatcaactggagtgtacccaaaacaaagatctagccaatcaagtctctgtgtgcctggagagactgggcagtttgacccttaagcctgaagattcaactgtcctgctctttgaagctgacacaattactctgcgccagaccatcaccacatttgggtctctcaaaaccattcaaattcctgagcacttgatggctcatgctagttcagcaaatattgggcccttcctggagaagagaggctgtatctccatgccagagcagaagtcagcatccggtattgtagctgtccctttcagcgaatggctccttggaagcaaacctgccagtggttatcaagctccttacatacccagcaccgacccccaggactggcttacccaaaagcagaccttggagaacagtcagacttcttccagagcctgcaatttcttcaataatgtcgggggaaacctaaagggcttagaaaactggctcctcaagagtgaaaaatcaagttatcaaaagtgtaacagccattccactactagttctttctccattgaaatggaaaaggttggagatcaagagcttcctgatcaagatgagatggacctatcagattggctagtgactccccaggaatcccataagctgcggaagcctgagaatggcagtcgtgaaaccagtgagaagtttaagctcttattccagtcctataatgtgaatgattggcttgtcaagactgactcctgtaccaactgtcagggaaaccagcccaaaggtgtggagattgaaaacctgggcaatctgaagtgcctgaatgaccacttggaggccaagaaaccattgtccacccccagcatggttacagaggattggcttgtccagaaccatcaggacccatgtaaggtagaggaggtgtgcagagccaatgagccctgcacaagctttgcagagtgtgtgtgtgatgagaattgtgagaaggaggctctgtataagtggcttctgaagaaagaaggaaaggataaaaatgggatgcctgtggaacccaaacctgagcctgagaagcataaagattccctgaatatgtggctctgtcctagaaaagaagtaatagaacaaactaaagcaccaaaggcaatgactccttctagaattgctgattccttccaagtcataaagaacagccccttgtcggagtggcttatcaggcccccatacaaagaaggaagtcccaaggaagtgcctggtactgaagacagagctggcaaacagaagtttaaaagccccatgaatacttcctggtgttcctttaacacagctgactgggtcctgccaggaaagaagatgggcaacctcagccagttatcttctggagaagacaagtggctgcttcgaaagaaggcccaggaagtattacttaattcacctctacaggaggaacataacttccccccagaccattatggcctccctgcagtttgtgatctctttgcctgtatgcagcttaaagttgataaagagaagtggttatatcgaactcctctacagatgtga

SEQ ID NO: 399 - DNA, 1008 bp, Homo sapiens;
atggaggactccggaaagactttcagctccgaggaggaagaagctaactattggaaagatctggcgatgacctacaaacagagggcagaaaatacgcaagaggaactccgagaattccaggagggaagccgagaatatgaagctgaattggagacgcagctgcaacaaattgaaaccaggaacagagacctcctgtccgaaaataaccgccttcgcatggagctggaaaccatcaaggagaagtttgaagtgcagcactctgaaggctaccggcagatctcagccttggaggatgacctcgcgcagaccaaagccattaaagaccaattgcagaaatacatcagagagctggagcaagcaaatgacgacctggaaagagccaagcgcgccacgatcatgtctctcgaagactttgagcagcgcttgaatcaggccatcgaaagaaatgccttcctggaaagtgaacttgatgaaaaagagaatctcctggaatctgttcagagactgaaggatgaagccagagatttgcggcaggaactggccgtgcagcagaagcaggagaaacccaggacccccatgcccagctcagtggaagctgagaggacagacacagctgtgcaggccacgggctccgtgccgtccacgcccattgctcaccgaggacccagctcaagtttaaacacacctgggagcttcagacgtggcctggacgactccaccggggggacccccctcacacctgcggcccggatatcagccctcaacattgtgggagacctactgcggaaagtcggggcactggagtccaaactcgcttcctgccggaacctcgtgtacgatcagtccccaaaccgaacaggtggcccagcctctgggcggagcagcaagaacagagatggcggggagagacggccaagcagcaccagcgtgcctttgggtgataaggggttggacacgagttgccgctggttgtccaaatcaacaaccaggtcgtccagctcctgctga

SEQ ID NO: 400 - DNA, 1038 bp, Homo sapiens;
atggatggtgaagatataccagatttttcaagtttaaaggaggaaactgcttattggaaggaactttccttgaagtataagcaaagcttccaggaagctcgggatgagctagttgaattccaggaaggaagcagagaattagaagcagagttggaggcacaattagtacaggctgaacaaagaaatagagacttgcaggctgataaccaaagactgaaatatgaagtggaggcattaaaggagaagctagagcatcaatatgcacagagctataagcaggtctcagtgttagaagatgatttaagtcagactcgggccattaaggagcagttgcataagtatgtgagagagctggagcaggccaacgacgacctggagcgagccaaaagggcaacaatagtttcactggaagactttgaacaaaggctaaaccaggccattgaacgaaatgcatttttagaaagtgaacttgatgaaaaggaatctttgttggtctctgtacagaggttaaaggatgaagcaagagatttaaggcaagaactagcagttcgggaaagacaacaggaagtaactagaaagtcggctcctagctctccaactctagactgtgaaaagatggactccgccgtccaagcatcactttctttgccagctacccctgttggcaaaggaacggagaacacttttccttcaccgaaagctataccaaatggttttggtaccagtccactaactccctctgctaggatatcagcactaaacatcgtgggggatctcttacggaaagtaggggctttagaatccaaattagcagcttgcaggaattttgcaaaggaccaagcatcacgaaaatcctatatttcagggaatgttaactgtggggtgctgaatggcaatggcacaaagttctctcgatcagggcatacatctttcttcgacaaaggggcagtaaacggctttgaccccgctcctcctcctcctggtctgggctcctcgcgtccatcgtcagcgccgggtatgctgcctctcagtgtgtga

SEQ ID NO: 401 - DNA, 666 bp, Homo sapiens;
atggcgttggcgttggcggcgctggcggcggtcgagccggcctgcggcagccggtaccagcagttgcagaatgaagaagagtctggagaacctgaacaggctgcaggtgatgctcctccaccttacagcagcatttctgcagagagcgcagcatattttgactacaaggatgagtctgggtttccaaagcccccatcttacaatgtagctacaacactgcccagttatgatgaagcggagaggaccaaggctgaagctactatccctttggttcctgggagagatgaggattttgtgggtcgggatgattttgatgatgctgaccagctgaggataggaaatgatgggattttcatgttaacttttttcatggcattcctctttaactggattgggtttttcctgtctttttgcctgaccacttcagctgcaggaaggtatggggccatttcaggatttggtctctctctaattaaatggatcctgattgtcaggttttccacctatttccctggatattttgatggtcagtactggctctggtgggtgttccttgttttaggctttctcctgtttctcagaggatttatcaattatgcaaaagttcggaagatgccagaaactttctcaaatctccccaggaccagagttctctttatttattaa

SEQ ID NO: 402 - DNA, 792 bp, Homo sapiens;
atggaggagagcgggtacgagtcggtgctctgtgtcaagcctgacgtccacgtctaccgcatccctccgcgggctaccaaccgtggctacagggctgcggagtggcagctggaccagccatcatggagtggccggctgaggatcactgcaaagggacagatggcctacatcaagctggaggacaggacgtcaggggagctctttgctcaggccccggtggatcagtttcctggcacagctgtggagagtgtgacggattccagcaggtacttcgtgatccgcatcgaagatggaaatgggcgacgggcgtttattggaattggcttcggggaccgaggtgatgcctttgacttcaatgttgcattgcaggaccatttcaagtgggtgaaacagcagtgtgaatttgcaaaacaagcccagaacccagaccaaggccctaaactggacctgggcttcaaggagggccagaccatcaagctcaacatcgcaaacatgaagaagaaggaaggagcagctgggaatccccgagtccggcctgccagcacaggagggctgagcctgcttccccctcccccaggggggaaaacctccaccctgatccctccccctggggagcagttggctgtggggggatccctcgtccagccagcagttgctcccagttcaggaggtgctcctgtaccctggccacagcccaatcctgccactgctgacatctggggagactttaccaaatctacaggatcaacttccagccagacccagccaggcacaggctgggtccagttctga

SEQ ID NO: 403 - DNA, 909 bp, Homo sapiens;
atggatgagcaatcacaaggaatgcaagggccacctgttcctcagttccaaccacagaaggccttacgaccggatatgggctataatacattagccaactttcgaatagaaaagaaaattggtcgcggacaatttagtgaagtttatagagcagcctgtctcttggatggagtaccagtagctttaaaaaaagtgcagatatttgatttaatggatgccaaagcacgtgctgattgcatcaaagaaatagatcttcttaagcaactcaaccatccaaatgtaataaaatattatgcatcattcattgaagataatgaactaaacatagttttggaactagcagatgctggcgacctatccagaatgatcaagcattttaagaagcaaaagaggctaattcctgaaagaactgtttggaagtattttgttcagctttgcagtgcattggaacacatgcattctcgaagagtcatgcatagagatataaaaccagctaatgtgttcattacagccactggggtggtaaaacttggagatcttgggcttggccggtttttcagctcaaaaaccacagctgcacattctttagttggtacgccttattacatgtctccagagagaatacatgaaaatggatacaacttcaaatctgacatctggtctcttggctgtctactatatgagatggctgcattacaaagtcctttctatggtgacaaaatgaatttatactcactgtgtaagaagatagaacagtgtgactacccacctcttccttcagatcactattcagaagaactccgacagttagttaatatgtgcatcaacccagatccagagaagcgaccagacgtcacctatgtttatgacgtagcaaagaggatgcatgcatgcactgcaagcagctaa

SEQ ID NO: 404 - DNA, 2910 bp, Homo sapiens;
atggcagaagatgatccatatttgggaaggcctgaacaaatgtttcatttggatccttctttgactcatacaatatttaatccagaagtatttcaaccacagatggcactgccaacagcagatggcccataccttcaaatattagagcaacctaaacagagaggatttcgtttccgttatgtatgtgaaggcccatcccatggtggactacctggtgcctctagtgaaaagaacaagaagtcttaccctcaggtcaaaatctgcaactatgtgggaccagcaaaggttattgttcagttggtcacaaatggaaaaaatatccacctgcatgcccacagcctggtgggaaaacactgtgaggatgggatctgcactgtaactgctggacccaaggacatggtggtcggcttcgcaaacctgggtatacttcatgtgacaaagaaaaaagtatttgaaacactggaagcacgaatgacagaggcgtgtataaggggctataatcctggactcttggtgcaccctgaccttgcctatttgcaagcagaaggtggaggggaccggcagctgggagatcgggaaaaagagctaatccgccaagcagctctgcagcagaccaaggagatggacctcagcgtggtgcggctcatgtttacagcttttcttccggatagcactggcagcttcacaaggcgcctggaacccgtggtatcagacgccatctatgacagtaaagcccccaatgcatccaacttgaaaattgtaagaatggacaggacagctggatgtgtgactggaggggaggaaatttatcttctttgtgacaaagttcagaaagatgacatccagattcgattttatgaagaggaagaaaatggtggagtctgggaaggatttggagatttttcccccacagatgttcatagacaatttgccattgtcttcaaaactccaaagtataaagatattaatattacaaaaccagcctctgtgtttgtccagcttcggaggaaatctgacttggaaactagtgaaccaaaacctttcctctactatcctgaaatcaaagataaagaagaagtgcagaggaaacgtcagaagctcatgcccaatttttcggatagtttcggcggtggtagtggtgctggagctggaggcggaggcatgtttggtagtggcggtggaggagggggcactggaagtacaggtccagggtatagcttcccacactatggatttcctacttatggtgggattactttccatcctggaactactaaatctaatgctgggatgaagcatggaaccatggacactgaatctaaaaaggaccctgaaggttgtgacaaaagtgatgacaaaaacactgtaaacctctttgggaaagttattgaaaccacagagcaagatcaggagcccagcgaggccaccgttgggaatggtgaggtcactctaacgtatgcaacaggaacaaaagaagagagtgctggagttcaggataacctctttctagagaaggctatgcagcttgcaaagaggcatgccaatgcccttttcgactacgcggtgacaggagacgtgaagatgctgctggccgtccagcgccatctcactgctgtgcaggatgagaatggggacagtgtcttacacttagcaatcatccaccttcattctcaacttgtgagggatctactagaagtcacatctggtttgatttctgatgacattatcaacatgagaaatgatctgtaccagacgcccttgcacttggcagtgatcactaagcaggaagatgtggtggaggatttgctgagggctggggccgacctgagccttctggaccgcttgggtaactctgttttgcacctagctgccaaagaaggacatgataaagttctcagtatcttactcaagcacaaaaaggcagcactacttcttgaccaccccaacggggacggtctgaatgccattcatctagccatgatgagcaatagcctgccatgtttgctgctgctggtggccgctggggctgacgtcaatgctcaggagcagaagtccgggcgcacagcactgcacctggctgtggagcacgacaacatctcattggcaggctgcctgctcctggagggtgatgcccatgtggacagtactacctacgatggaaccacacccctgcatatagcagctgggagagggtccaccaggctggcagctcttctcaaagcagcaggagcagatcccctggtggagaactttgagcctctctatgacctggatgactcttgggaaaatgcaggagaggatgaaggagttgtgcctggaaccacgcctctagatatggccaccagctggcaggtatttgacatattaaatgggaaaccatatgagccagagtttacatctgatgatttactagcacaaggagacatgaaacagctggctgaagatgtgaagctgcagctgtataagttactagaaattcctgatccagacaaaaactgggctactctggcgcagaaattaggtctggggatacttaataatgccttccggctgagtcctgctccttccaaaacacttatggacaactatgaggtctctgggggtacagtcagagagctggtggaggccctgagacaaatgggctacaccgaagcaattgaagtgatccaggcagcctccagcccagtgaagaccacctctcaggcccactcgctgcctctctcgcctgcctccacaaggcagcaaatagacgagctccgagacagtgacagtgtctgcgacagcggcgtggagacatccttccgcaaactcagctttaccgagtctctgaccagtggtgcctcactgctaactctcaacaaaatgccccatgattatgggcaggaaggacctctagaaggcaaaatttag

SEQ ID NO: 405 - DNA, 1044 bp, Homo sapiens;
atggagcagtatacagcaaacagcaatagttcgacagagcagattgttgtccaggcaggacagattcagcagcagcagcagggtggtgtcactgctgtgcagttgcagactgaggcccaggtggcatccgcctcaggccagcaagtccagaccctccaggtagtccaagggcagccattaatggtgcaggtcagtggaggccagctaatcacatcaactggccaacccatcatggtccaggctgtccctggtggacaaggtcaaaccatcatgcaagtacctgtttctggaacacagggtttgcagcaaatacagttggtcccacctggacagatccagatccagggtggacaggctgtgcaggtgcagggccagcagggccagacccagcagatcatcatccagcagccccagacggctgtcactgctggccagactcagacacagcagcagattgctgtccagggacagcaagtggcacagactgctgaagggcagaccatcgtctatcaaccagttaatgcagatggcaccattctccagcaagttacagtccctgtttcaggcatgatcactatcccagcagccagtttggcaggagcacagattgttcaaacaggagccaataccaacacaaccagcagtgggcaagggactgtcactgtgacactaccagtggcaggcaatgtggtcaattcaggagggatggtcatgatggttcctggggctggctctgtgcctgctatccaaagaatccctctacctggagcagagatgcttgaagaagagcctctctacgtgaatgccaaacaataccaccgtattcttaagaggaggcaagcccgagctaaactagaggcagaagggaaaattccaaaggagagaaggaaatacctgcatgagtctcggcaccgtcatgccatggcacggaagcgtggtgaaggtggacgatttttctctccaaaggaaaaggatagtccccatatgcaggatccaaaccaagccgatgaagaagcaatgacacagatcatccgagtgtcctaa

SEQ ID NO: 406 - DNA, 4290 bp, Homo sapiens;; identical to SEQ ID NO: 53

SEQ ID NO: 407 - DNA, 3123 bp, Homo sapiens;
atgggggaagagggtggttcagcctctcacgatgaggaggaaagagcaagtgtcctcctcggacattctccgggttgtgaaatgtgctcgcaggaggcttttcaggcacagaggagccagctggtcgagctgctggtctcagggtccctggaaggcttcgagagtgtcctggactggctgctgtcctgggaggtcctctcctgggaggactacgagggcttccacctcctgggccagcctctctcccacttggccaggcgccttctggacaccgtctggaataagggtacttgggcctgtcagaagctcatcgcggctgcccaagaagcccaggccgacagccagtcccccaagctgcatggctgctgggacccccactcgctccacccagcccgagacctgcagagtcaccggccagccattgtcaggaggctccacagccatgtggagaacatgctggacctggcatgggagcggggtttcgtcagccagtatgaatgtgatgaaatcaggttgccgatcttcacaccgtcccagagggcaagaaggctgcttgatcttgccacggtgaaagcgaatggattggctgccttccttctacaacatgttcaggaattaccagtcccattggccctgcctttggaagctgccacatgcaagaagtatatggccaagctgaggaccacggtgtctgctcagtctcgcttcctcagtacctatgatggagcagagacgctctgcctggaggacatatacacagagaatgtcctggaggtctgggcagatgtgggcatggctggacccccgcagaagagcccagccaccctgggcctggaggagctcttcagcacccctggccacctcaatgacgatgcggacactgtgctggtggtgggtgaggcgggcagtggcaagagcacgctcctgcagcggctgcacttgctgtgggctgcagggcaagacttccaggaatttctctttgtcttcccattcagctgccggcagctgcagtgcatggccaaaccactctctgtgcggactctactctttgagcactgctgttggcctgatgttggtcaagaagacatcttccagttactccttgaccaccctgaccgtgtcctgttaacctttgatggctttgacgagttcaagttcaggttcacggatcgtgaacgccactgctccccgaccgaccccacctctgtccagaccctgctcttcaaccttctgcagggcaacctgctgaagaatgcccgcaaggtggtgaccagccgtccggccgctgtgtcggcgttcctcaggaagtacatccgcaccgagttcaacctcaagggcttctctgaacagggcatcgagctgtacctgaggaagcgccatcatgagcccggggtggcggaccgcctcatccgcctgctccaagagacctcagccctgcacggtttgtgccacctgcctgtcttctcatggatggtgtccaaatgccaccaggaactgttgctgcaggagggggggtccccaaagaccactacagatatgtacctgctgattctgcagcattttctgctgcatgccacccccccagactcagcttcccaaggtctgggacccagtcttcttcggggccgcctccccaccctcctgcacctgggcagactggctctgtggggcctgggcatgtgctgctacgtgttctcagcccagcagctccaggcagcacaggtcagccctgatgacatttctcttggcttcctggtgcgtgccaaaggtgtcgtgccagggagtacggcgcccctggaattccttcacatcactttccagtgcttctttgccgcgttctacctggcactcagtgctgatgtgccaccagctttgctcagacacctcttcaattgtggcaggccaggcaactcaccaatggccaggctcctgcccacgatgtgcatccaggcctcggagggaaaggacagcagcgtggcagctttgctgcagaaggccgagccgcacaaccttcagatcacagcagccttcctggcagggctgttgtcccgggagcactggggcctgctggctgagtgccagacatctgagaaggccctgctccggcgccaggcctgtgcccgctggtgtctggcccgcagcctccgcaagcacttccactccatcccgccagctgcaccgggtgaggccaagagcgtgcatgccatgcccgggttcatctggctcatccggagcctgtacgagatgcaggaggagcggctggctcggaaggctgcacgtggcctgaatgttgggcacctcaagttgacattttgcagtgtgggccccactgagtgtgctgccctggcctttgtgctgcagcacctccggcggcccgtggccctgcagctggactacaactctgtgggtgacattggcgtggagcagctgctgccttgccttggtgtctgcaaggctctgtatttgcgcgataacaatatctcagaccgaggcatctgcaagctcattgaatgtgctcttcactgcgagcaattgcagaagttagctctattcaacaacaaattgactgacggctgtgcacactccatggctaagctccttgcatgcaggcagaacttcttggcattgaggctggggaataactacatcactgccgcgggagcccaagtgctggccgaggggctccgaggcaacacctccttgcagttcctgggattctggggcaacagagtgggtgacgagggggcccaggccctggctgaagccttgggtgatcaccagagcttgaggtggctcagcctggtggggaacaacattggcagtgtgggtgcccaagccttggcactgatgctggcaaagaacgtcatgctagaagaactctgcctggaggagaaccatctccaggatgaaggtgtatgttctctcgcagaaggactgaagaaaaattcaagtttgaaaatcctgaagttgtccaataactgcatcacctacctaggggcagaagccctcctgcaggcccttgaaaggaatgacaccatcctggaagtctggctccgagggaacactttctctctagaggaggttgacaagctcggctgcagggacaccagactcttgctttga

SEQ ID NO: 408 - DNA, 906 bp, Homo sapiens;
atgacgcggcatggcaagaactgcaccgcaggggccgtctacacctaccacgagaagaagaaggacacagcggcctcgggctatgggacccagaacattcgactgagccgggatgccgtgaaggacttcgactgctgttgtctctccctgcagccttgccacgatcctgttgtcaccccagatggctacctgtatgagcgtgaggccatcctggagtacattctgcaccagaagaaggagattgcccggcagatgaaggcctacgagaagcagcggggcacccggcgcgaggagcagaaggagcttcagcgggcggcctcgcaggaccatgtgcggggcttcctggagaaggagtcggctatcgtgagccggcccctcaaccctttcacagccaaggccctctcgggcaccagcccagatgatgtccaacctgggcccagtgtgggtcctccaagtaaggacaaggacaaagtgctgcccagcttctggatcccgtcgctgacgcccgaagccaaggccaccaagctggagaagccgtcccgcacggtgacctgccccatgtcagggaagcccctgcgcatgtcggacctgacgcccgtgcacttcacaccgctagacagctccgtggaccgcgtggggctcatcacccgcagcgagcgctacgtgtgtgccgtgacccgcgacagcctgagcaacgccaccccctgcgctgtgctgcggccctctggggctgtggtcaccctcgaatgcgtggagaagctgattcggaaggacatggtggaccctgtgactggagacaaactcacagaccgcgacatcatcgtgctgcagcggggcggtaccggcttcgcgggctccggagtgaagctgcaagcggagaaatcacggccggtgatgcaggcctga

SEQ ID NO: 409 - DNA, 963 bp, Homo sapiens;
atggccttcccaaagaagaaacttcagggtcttgtggctgcaaccatcacgccaatgactgagaatggagaaatcaacttttcagtaattggtcagtatgtggattatcttgtgaaagaacagggagtgaagaacatttttgtgaatggcacaacaggagaaggcctgtccctgagcgtctcagagcgtcgccaggttgcagaggagtgggtgacaaaagggaaggacaagctggatcaggtgataattcacgtaggagcactgagcttgaaggagtcacaggaactggcccaacatgcagcagaaataggagctgatggcatcgctgtcattgcaccgttcttcctcaagccatggaccaaagatatcctgattaatttcctaaaggaagtggctgctgccgcccctgccctgccattttattactatcacattcctgccttgacaggggtaaagattcgtgctgaggagttgttggatgggattctggataagatccccaccttccaagggctgaaattcagtgatacagatctcttagacttcgggcaatgtgttgatcagaatcgccagcaacagtttgctttcctttttggggtggatgagcaactgttgagtgctctggtgatgggagcaactggagcagtgggcagtacctataactacctgggaaaaaagacaaaccagatgttggaggcttttgaacaaaaggacttctctttagccctgaactatcagttttgtatccagagatttatcaactttgttgtcaaactaggttttggagtgtcacagaccaaagccatcatgactctggtctctgggattccaatgggcccaccccggcttccactgcagaaagcctccagggagtttactgatagtgctgaagctaaactgaagagcctggatttcctttctttcactgatttaaaggatggaaacttggaagctggtagctag

SEQ ID NO: 410 - DNA, 2334 bp, Homo sapiens;
atggactccaaagaatcattaactcctggtagagaagaaaaccccagcagtgtgcttgctcaggagaggggagatgtgatggacttctataaaaccctaagaggaggagctactgtgaaggtttctgcgtcttcaccctcactggctgtcgcttctcaatcagactccaagcagcgaagacttttggttgattttccaaaaggctcagtaagcaatgcgcagcagccagatctgtccaaagcagtttcactctcaatgggactgtatatgggagagacagaaacaaaagtgatgggaaatgacctgggattcccacagcagggccaaatcagcctttcctcgggggaaacagacttaaagcttttggaagaaagcattgcaaacctcaataggtcgaccagtgttccagagaaccccaagagttcagcatccactgctgtgtctgctgcccccacagagaaggagtttccaaaaactcactctgatgtatcttcagaacagcaacatttgaagggccagactggcaccaacggtggcaatgtgaaattgtataccacagaccaaagcacctttgacattttgcaggatttggagttttcttctgggtccccaggtaaagagacgaatgagagtccttggagatcagacctgttgatagatgaaaactgtttgctttctcctctggcgggagaagacgattcattccttttggaaggaaactcgaatgaggactgcaagcctctcattttaccggacactaaacccaaaattaaggataatggagatctggttttgtcaagccccagtaatgtaacactgccccaagtgaaaacagaaaaagaagatttcatcgaactctgcacccctggggtaattaagcaagagaaactgggcacagtttactgtcaggcaagctttcctggagcaaatataattggtaataaaatgtctgccatttctgttcatggtgtgagtacctctggaggacagatgtaccactatgacatgaatacagcatccctttctcaacagcaggatcagaagcctatttttaatgtcattccaccaattcccgttggttccgaaaattggaataggtgccaaggatctggagatgacaacttgacttctctggggactctgaacttccctggtcgaacagttttttctaatggctattcaagccccagcatgagaccagatgtaagctctcctccatccagctcctcaacagcaacaacaggaccacctcccaaactctgcctggtgtgctctgatgaagcttcaggatgtcattatggagtcttaacttgtggaagctgtaaagttttcttcaaaagagcagtggaaggacagcacaattacctatgtgctggaaggaatgattgcatcatcgataaaattcgaagaaaaaactgcccagcatgccgctatcgaaaatgtcttcaggctggaatgaacctggaagctcgaaaaacaaagaaaaaaataaaaggaattcagcaggccactacaggagtctcacaagaaacctctgaaaatcctggtaacaaaacaatagttcctgcaacgttaccacaactcacccctaccctggtgtcactgttggaggttattgaacctgaagtgttatatgcaggatatgatagctctgttccagactcaacttggaggatcatgactacgctcaacatgttaggagggcggcaagtgattgcagcagtgaaatgggcaaaggcaataccaggtttcaggaacttacacctggatgaccaaatgaccctactgcagtactcctggatgtttcttatggcatttgctctggggtggagatcatatagacaatcaagtgcaaacctgctgtgttttgctcctgatctgattattaatgagcagagaatgactctaccctgcatgtacgaccaatgtaaacacatgctgtatgtttcctctgagttacacaggcttcaggtatcttatgaagagtatctctgtatgaaaaccttactgcttctctcttcagttcctaaggacggtctgaagagccaagagctatttgatgaaattagaatgacctacatcaaagagctaggaaaagccattgtcaagagggaaggaaactccagccagaactggcagcggttttatcaactgacaaaactcttggattctatgcatgaagtggttgaaaatctccttaactattgcttccaaacatttttggataagaccatgagtattgaattccccgagatgttagctgaaatcatcaccaatcagataccaaaatattcaaatggaaatatcaaaaaacttctgtttcatcaaaagtga

SEQ ID NO: 411 - DNA, 864 bp, Homo sapiens;
atggaagtaatggaaggacccctcaacctggctcatcaacagagcagacgagcagaccgtttattagctgcaggcaaatacgaagaggctatttcttgtcacaaaaaggctgcagcatatctttctgaagccatgaagctgacacagtcagagcaggctcatctttcactggaattgcaaagggatagccatatgaaacagctcctcctcatccaagagagatggaaaagggcccagcgtgaagaaagattgaaagcccagcagaacacagacaaggatgcagctgcccatcttcagacatctcacaaaccctctgcagaggatgcagagggccagagtcccctttctcagaagtacagcccttccacagagaaatgcctgcctgagattcaggggatctttgacagggatccagacacactactttatttacttcagcaaaagagtgagccagcagagccatgtattggaagcaaagccccaaaagatgataaaacaattatagaggagcaggcaaccaaaattgcagatttgaagaggcatgtggaattccttgtggctgagaatgaaagattaaggaaagaaaataaacaactaaaggctgaaaaggccagacttctaaaaggtccaatagaaaaggagctggatgtagatgctgattttgtagaaacgtcagagttatggagcttgccaccacatgcagaaactgctacagcctcctcaacctggcagaagttcgcagcaaatactgggaaagccaaggacattccaatccccaatcttcctcccttggattttccatctccagaacttcctcttatggagctctctgaggatattctgaaaggatttatgaataattaa

SEQ ID NO: 412 - DNA, 1023 bp, Homo sapiens;
atgctgacccagctgaaagcaaaatcagaggggaagcttgcaaaacagatttgcaaagttgtgttggatcattttgaaaaacagtattccaaagaactcggagatgcctggaatacagtaagggagatactaacatctccatcatgctggcaatatgctgtcctgcttaaccgattcaattatccttttgaactggaaaaggatttacatttgaagggctatcacacactctctcagggatctttacccaactatcctaaatcagtgaagtgttaccttagcagaactccgggccgaatcccttcagaaagacaccaaattggaaacctgaaaaaatattatctcctaaatgctgcttctcttctcccagtgttggctctggaattaagggatggggagaaggttctggatctctgtgctgctcctggagggaaatcaatagctctgctgcagtgtgcttgtccaggttatcttcattgtaatgaatatgatagtctgagattgaggtggctaaggcagacgttggaatctttcatcccacagcctttgataaatgtaattaaagtgtctgaattggatggcagaaaaatgggagatgcccagcctgaaatgtttgacaaggtgttagtggatgctccgtgttcaaatgatcgaagctggttgttttcttctgactctcagaaggcatcctgtaggataagtcaaaggaggaatttgcctcttctacagatagagctgttaaggtctgcaattaaggccttacgtcctggagggatacttgtatactctacatgcacgctttccaaggcagaaaatcaagatgtgatcagtgaaattttaaactcccacggtaacatcatgcctatggacattaaaggaatagcaaggacttgctcccacgacttcacatttgctcccactggccaggaatgtgggctcttagtgattccagataagggcaaagcctggggcccaatgtatgtagccaaattgaagaaatcatggagcacaggaaaatggtga

SEQ ID NO: 413 - DNA, 1923 bp, Homo sapiens;
atgaacaaattacggcaaagttttaggagaaagaaggatgtttatgttccagaggccagtcgtccacatcagtggcagacagatgaagaaggcgttcgcaccggaaaatgtagcttcccggttaagtaccttggccatgtagaagttgatgaatcaagaggaatgcacatctgtgaagatgctgtaaaaagattgaaagctactggaaagaaagcagttaaagcagttctgtgggtctcagcagatggactcagagttgtggatgaaaaaactaaggacctcatagttgaccagacgatagagaaagtttctttctgtgccccagacaggaactttgatagagccttttcttacatatgccgtgatggcaccactcgtcgctggatctgtcactgcttcatggctgtcaaggacacaggtgaaaggttgagccatgcagtaggctgtgcttttgcagcctgtttagagcgcaagcagaagcgggagaaggaatgtggagtgactgctacttttgatgctagtcggaccacttttacaagagaaggatcattccgtgtcacaacagccactgaacaagcagaaagagaggagatcatgaaacaaatgcaagatgccaagaaagctgaaacagataagatagtcgttggttcatcagttgcccctggcaacactgccccatccccatcctctcccacctctcctacttctgatgccacgacctctctggagatgaacaatcctcatgccatcccacgccggcatgctccaattgaacagcttgctcgccaaggctctttccgaggttttcctgctcttagccagaagatgtcaccctttaaacgccaactatccctacgcatcaatgagttgccttccactatgcagaggaagactgatttccccattaaaaatgcagtgccagaagtagaaggggaggcagagagcatcagctccctgtgctcacagatcaccaatgccttcagcacacctgaggaccccttctcatctgctccgatgaccaaaccagtgacagtggtggcaccacaatctcctaccttccaagctaatggcactgactcagccttccatgtgcttgctaagccagcccatactgctctagcacccgtagcaatgcctgtgcgtgaaaccaacccttgggcccatgcccctgatgctgctaacaaggaaattgcagccacatgttcggggaccgagtggggtcaatcttctggtgctgcctctccaggtctcttccaggccggtcatagacgtactccctctgaggccgaccgatggttagaagaggtgtctaagagcgtccgggctcagcagccccaggcctcagctgctcctctgcagccagttctccagcctcctccacccactgccatctcccagccagcatcacctttccaagggaatgcattcctcacctctcagcctgtgccagtgggtgtggtcccagccctgcaaccagcctttgtccctgcccagtcctatcctgtggccaatggaatgccctatccagcccctaatgtgcctgtggtgggcatcactccctcccagatggtggccaacgtatttggcactgcaggccaccctcaggctgcccatccccatcagtcacccagcctggtcaggcagcagacattccctcactacgaggcaagcagtgctaccaccagtcccttctttaagcctcctgctcagcacctcaacggttctgcagctttcaatggtgtagatgatggcaggttggcctcagcagacaggcatacagaggttcctacaggcacctgcccagtggatccttttgaagcccagtgggctgcattagaaaataagtccaagcagcgtactaatccctcccctaccaaccctttctccagtgacttacagaagacgtttgaaattgaactttaa

SEQ ID NO: 414 - DNA, 2064 bp, Homo sapiens;
atgggaaatggggagtcccagctgtcctcggtgcctgctcagaagctgggttggtttatccaggaatacctgaagccctacgaagaatgtcagacactgatcgacgagatggtgaacaccatctgtgacgtcctgcaggaacccgaacagttccccctggtgcagggagtggccataggtggctcctatggacggaaaacagtcttaagaggcaactccgatggtacccttgtcctcttcttcagtgacttaaaacaattccaggatcagaagagaagccaacgtgacatcctcgataaaactggggataagctgaagttctgtctgttcacgaagtggttgaaaaacaatttcgagatccagaagtcccttgatgggttcaccatccaggtgttcacaaaaaatcagagaatctctttcgaggtgctggccgccttcaacgctctgagcttaaatgataatcccagcccctggatctatcgagagctcaaaagatccttggataagacaaatgccagtcctggtgagtttgcagtctgcttcactgaactccagcagaagttttttgacaaccgtcctggaaaactaaaggatttgatcctcttgataaagcactggcatcaacagtgccagaaaaaaatcaaggatttaccctcgctgtctccgtatgccctggagctgcttacggtgtatgcctgggaacaggggtgcagaaaagacaactttgacattgctgaaggcgtcagaaccgtactggagctgatcaaatgccaggagaagctgtgtatctattggatggtcaactacaactttgaagatgagaccatcaggaacatcctgctgcaccagctccaatcagcgaggccagtaatcttggatccagttgacccaaccaataatgtgagtggagataaaatatgctggcaatggctgaaaaaagaagctcaaacctggttgacttctcccaacctggataatgagttacctgcaccatcttggaatgttctgcctgcaccactcttcacgaccccaggccaccttctggataagttcatcaaggagtttctccagcccaacaaatgcttcctagagcagattgacagtgctgttaacatcatccgtacattccttaaagaaaactgcttccgacaatcaacagccaagatccagattgtccggggaggatcaaccgccaaaggcacagctctgaagactggctctgatgccgatctcgtcgtgttccataactcacttaaaagctacacctcccaaaaaaacgagcggcacaaaatcgtcaaggaaatccatgaacagctgaaagccttttggagggagaaggaggaggagcttgaagtcagctttgagcctcccaagtggaaggctcccagggtgctgagcttctctctgaaatccaaagtcctcaacgaaagtgtcagctttgatgtgcttcctgcctttaatgcactgggtcagctgagttctggctccacacccagccccgaggtttatgcagggctcattgatctgtataaatcctcggacctcccgggaggagagttttctacctgtttcacagtcctgcagcgaaacttcattcgctcccggcccaccaaactaaaggatttaattcgcctggtgaagcactggtacaaagagtgtgaaaggaaactgaagccaaaggggtctttgcccccaaagtatgccttggagctgctcaccatctatgcctgggagcaggggagtggagtgccggattttgacactgcagaaggtttccggacagtcctggagctggtcacacaatatcagcagctctgcatcttctggaaggtcaattacaactttgaagatgagaccgtgaggaagtttctactgagccagttgcagaaaaccaggcctgtgatcttggacccagccgaacccacaggtgacgtgggtggaggggaccgttggtgttggcatcttctggcaaaagaagcaaaggaatggttatcctctccctgcttcaaggatgggactggaaacccaataccaccttggaaagtgccggtaaaagtcatctaa

SEQ ID NO: 415 - DNA, 1545 bp, Homo sapiens;
atggcactgatgcaggaactgtatagcacaccagcctccaggctggactccttcgtggctcagtggctgcagccccaccgggagtggaaggaagaggtgctagacgctgtgcggaccgtggaggagtttctgaggcaggagcatttccaggggaagcgtgggctggaccaggatgtgcgggtgctgaaggtagtcaaggtgggctccttcgggaatggcacggttctcaggagcaccagagaggtggagctggtggcgtttctgagctgtttccacagcttccaggaggcagccaagcatcacaaagatgttctgaggctgatatggaaaaccatgtggcaaagccaggacctgctggacctcgggctcgaggacctgaggatggagcagagagtccccgatgctctcgtcttcaccatccagaccagggggactgcggagcccatcacggtcaccattgtgcctgcctacagagccctggggccttctcttcccaactcccagccaccccctgaggtctatgtgagcctgatcaaggcctgcggtggtcctggaaatttctgcccatccttcagcgagctgcagagaaatttcgtgaaacatcggccaactaagctgaagagcctcctgcgcctggtgaaacactggtaccagcagtatgtgaaagccaggtcccccagagccaatctgccccctctctatgctcttgaacttctaaccatctatgcctgggaaatgggtactgaagaagacgagaatttcatgttggacgaaggcttcaccactgtgatggacctgctcctggagtatgaagtcatctgtatctactggaccaagtactacacactccacaatgcaatcattgaggattgtgtcagaaaacagctcaaaaaagagaggcccatcatcctggatccggccgaccccaccctcaacgtggcagaagggtacagatgggacatcgttgctcagagggcctcccagtgcctgaaacaggactgttgctatgacaacagggagaaccccatctccagctggaacgtgaagagggcacgagacatccacttgacagtggagcagaggggttacccagatttcaacctcatcgtgaacccttatgagcccataaggaaggttaaagagaaaatccggaggaccaggggctactctggcctgcagcgtctgtccttccaggttcctggcagtgagaggcagcttctcagcagcaggtgctccttagccaaatatgggatcttctcccacactcacatctatctgctggagaccatcccctccgagatccaggtcttcgtgaagaatcctgatggtgggagctacgcctatgccatcaaccccaacagcttcatcctgggtctgaagcagcagattgaagaccagcaggggcttcctaaaaagcagcagcagctggaattccaaggccaagtcctgcaggactggttgggtctggggatctatggcatccaagacagtgacactctcatcctctcgaagaagaaaggagaggctctgtttccagccagttag

SEQ ID NO: 416 - DNA, 1356 bp, Homo sapiens;
atgggcaacctgctcggcggggtcagcttccgcgagcccaccaccgtggaggactgcgactccacctggcagaccgactcggagcccgagcccgaagaaccagggccgggcggcggcagcgagggcccggggcaggagtccgagcagcccgcgcagcccccggagcaagccggcgggcggcccggcgccagccccgcgccggacgaggacgccgaggcggcgggcgccgagcagggtggtgattccactgaagcaactgccaaaccaaagagaagtttttatgctgccagggatttgtacaagtaccgacaccagtacccaaacttcaaagatatccgatatcaaaatgacttgagcaatcttcgtttttataagaataaaattccattcaagccagatggtgtttacattgaagaagttctaagtaaatggaaaggagattatgaaaaactggagcacaaccacacttacattcaatggcttttccccctgagagaacaaggcttgaacttctatgccaaagaactaactacatatgaaattgaggaattcaaaaaaacaaaagaagcaattagaagattcctcctggcttataaaatgatgctagaattttttggaataaaactgactgataaaactggaaatgttgctcgggctgttaactggcaggaaagatttcagcatctgaatgagtcccagcacaactatttaagaatcactcgtattcttaaaagccttggtgagcttggatatgaaagttttaaatctcctcttgtaaaatttattcttcatgaagctcttgtggagaatactattcccaatattaagcagagtgctctagagtattttgtttatacaattagagacagaagagaaaggagaaagctcctgcggttcgcccagaaacactacacgccttcagagaactttatctggggaccgcctcgaaaagaacagtcggagggaagcaaagcccagaaaatgtcttcccctctcgcctccagtcataacagtcaaacttctatgcacaaaaaagccaaggactccaaaaattcctcctcagctgttcatttaaatagcaaaacagctgaagacaaaaaagtggcaccaaaagagcctgtggaagagacagacaggcccagcccagagcccagcaatgaagctgccaagccaagaaatacagagaaggacagtaatgctgagaacatgaattctcaacctgagaaaacagttactactcccacagaaaaaaaggagagtgtatctcctgagaataacgaagaaggtggaaatgataaccaagacaatgaaaatcctggaaatacaaattgccatgatgttgtactagtacagtga

SEQ ID NO: 417 - DNA, 2244 bp, Homo sapiens;
atgcaggggggtgaaccagtgtccacaatgaaagtctcggagagcgaaggaaagctggagggccaggccacagcggtgaccccgaacaagaacagcagctgtggaggtggaatcagtagcagcagcagcagccgcggtggcagtgcaaaaggctggcagtacagtgatcacatggaaaatgtgtatggctatttaatgaagtataccaaccttgtcactgggtggcagtacaggttttttgttttaaacaatgaagctgggctgttggagtactttgtgaatgaacagtctagaaatcagaaacctagaggaactttgcagcttgcaggagctgtaatatcacccagtgatgaggattctcacaccttcactgtaaacgctgccagtggggaacaatataaactcagagctacagatgcaaaagagcgacagcactgggttagcagacttcagatatgtacacagcatcatactgaagctattggaaagaataatcctcctctgaagtcacggagcttctcacttgcatctagtagtaattctcctatatcgcagaggagaccaagtcaaaatgccatttctttttttaatgttggacattccaaactgcaatcactgagcaaaagaactaatttacctccagaccatcttgtggaagtcagagaaatgatgtctcatgctgaaggacaacaaagagacttaattagacgaattgaatgccttcctacttctggccatcttagttccttggaccaggatctcttaatgctcaaagctacttccatggcaactatgaactgcttaaatgactgctttcatattctccagttacagcatgcatcacatcagaagggctcattgccttcaggaacgacaatcgagtggttagaaccaaagatatctttatcaaaccactataaaaatggagctgaccagccctttgcaactgatcagagtaagccggtggcagtcccagaagagcagcctgttgcagaatctggactattagcgagggagcctgaagaaataaatgcagatgatgagatagaggatacatgtgaccacaaagaggatgacctgggagctgtagaagaacaacgtagtgtcatcctacatctcttgtcacagcttaagctgggcatggatttaacaagagtggtgcttcctacatttatcctagagaagcgttccttgctggaaatgtatgcagactttatgtctcatccagacctatttatagccatcactaatggagccacagctgaggacagaatgattcgctttgttgagtactaccttacctcatttcatgaaggccgtaagggagccattgctaaaaaaccatacaatcctatcattggagaaacatttcactgttcctggaagatgccaaaaagcgaggtagcatccagtgtttttagcagttcttccacccagggagtcacaaatcatgctcctttatcgggggagtctttgacccaggtgggatcagactgttacacagtcagatttgttgctgagcaggtttctcatcatcctccagtctcaggattttatgcagaatgtacagagaggaagatgtgtgtaaatgcgcatgtctggactaagagcaagttcttaggcatgtcaataggcgtgacaatggttggagaaggtatccttagtctgttggagcatggagaagagtacacattttctctaccctgtgcatatgctcggtcaattttgactgttccttgggtagaactgggtggcaaagtcagtgtcaactgtgcaaaaactggatattcagccagcatcacttttcataccaagccattttatggtggcaaactgcatcgggttacagctgaagtaaagcacaacatcaccaacactgtggtatgcagagtgcaaggggaatggaatagtgttcttgagttcacatatagcaatggagagacaaagtatgtggacttgactaaattggcagtgacgaagaaaagagtgagacctctggagaagcaggatccatttgaatccaggcgattgtggaaaaatgtgacagactcgctgagagaatctgaaattgataaggccacagagcataagcataccctggaagaacgtcagaggactgaagaaaggcatcgtactgaaacaggcacaccttggaaaaccaaatattttattaaagagggagatggctgggtttatcataaaccactttggaaaataattccaacaacacaaccagcagagtga

SEQ ID NO: 418 - DNA, 1407 bp, Homo sapiens;
atgaacggagaggaagaattctttgatgccgtcacagaggcaaatcagaaagtcacgggaatgattgacttagacaccagcaaaaataataggattgggaaaactggggagaggccctctcaagagaacggaattcagaaacacaggacatcgctgccggctcccatgttcagcagaagcgacttcagcgtgtggaccatcctgaagaagtgtgttggcctggagctgtccaagatcacgatgccaatcgccttcaacgagcctctgagcttcttgcagcggatcacggagtacatggagcacgtgtacctcatccacagggcctcctgccagccccagcccctggagaggatgcagtctgtggctgcttttgctgtttcggctgtggcttcccagtgggagaggaccggcaaaccatttaatccactcttgggagaaacgtatgaattaatcagggaagatttaggattcagatttatatcggaacaggtcagtcaccacccccccatcagtgcgttccactcggaaggtctcaaccatgacttcctgttccatggctccatctaccccaagctcaagttctggggcaaaagcgtggaggcggagccccgaggcaccatcaccctggagctgctcaaacataatgaagcctacacctggaccaaccccacctgctgcgtccacaacgtcatcatcgggaagctgtggatagagcagtatgggacagtggagattttaaaccacagaactggacataagtgtgtgcttcactttaaaccgtgtggattatttggaaaagaacttcacaaggtggaaggacacattcaagacaaaaacaaaaagaagctctttatgatctatggcaaatggacggaatgtttgtggggcatagatcctgtttcgtatgaatccttcaagaagcaggagaggagaggtgaccacctgagaaaggccaagctggatgaagactccgggaaggctgacagcgacgtggctgacgacgtgcctgtggcccaggagaccgtgcaggtcattcctggcagcaagctgctctggaggatcaacacccggccccccaactctgcccagatgtataatttcaccagtttcactgtgagcctcaacgagctggagacaggcatggagaagaccctgccacccacggactgccgcctgcgccctgacatccgcggcatggagaatggcaacatggatctggccagccaggagaaggagcggctggaggagaagcagagagaagcacggagggagcgggccaaggaggaggcagagtggcagacgaggtggttctacccaggcaataacccctacactgggacccccgactggttgtatgcaggggattactttgagcggaatttctccgactgcccagatatctactga

SEQ ID NO: 419 - DNA, 1461 bp, Homo sapiens;
atgtctgtcacatatgatgattccgttggagtagaagtgtccagcgacagcttctgggaggtcgggaactacaagcggactgtgaagcggatcgacgatggccaccgcctgtgcagcgacctcatgaactgcctgcatgagcgggcgcgcatcgagaaggcgtatgcgcagcagctcactgagtgggcccggcgctggaggcagctcgtggagaaagggccccagtacgggaccgtggagaaggcctggatggccttcatgtccgaggcagagagggtgagcgagctgcacctcgaggtgaaggcctcactgatgaacgatgacttcgagaagatcaagaactggcagaaggaagcctttcacaagcagatgatgggcggcttcaaggagaccaaggaagctgaggacggctttcggaaggcacagaagccctgggccaagaagctgaaagaggtagaagcagcaaagaaagcccaccatgcagcgtgcaaagaggagaagctggctatctcacgagaagccaacagcaaggcagacccatccctcaaccctgaacagctcaagaaattgcaagacaaaatagaaaagtgcaagcaagatgttcttaagaccaaagagaagtatgagaagtccctgaaggaactcgaccagggcacaccccagtacatggagaacatggagcaggtgtttgagcagtgccagcagttcgaggagaaacgccttcgcttcttccgggaggttctgctggaggttcagaagcacctagacctgtccaatgtggctggctacaaagccatttaccatgacctggagcagagcatcagagcagctgatgcagtggaggacctgaggtggttccgagccaatcacgggccgggcatggccatgaactggccgcagtttgaggagtggtccgcagacctgaatcgaaccctcagccggagagagaagaagaaggccactgacggcgtcaccctgacgggcatcaaccagacaggcgaccagtctctgccgagtaagcccagcagcacccttaatgtcccgagcaaccccgcccagtctgcgcagtcacagtccagctacaaccccttcgaggatgaggacgacacgggcagcaccgtcagtgagaaggacgacactaaggccaaaaatgtgagcagctacgagaagacccagagctatcccaccgactggtcagacgatgagtctaacaaccccttctcctccacggatgccaatggggactcgaatccattcgacgacgacgccacctcggggacggaagtgcgagtccgggccctgtatgactatgaggggcaggagcatgatgagctgagcttcaaggctggggatgagctgaccaagatggaggacgaggatgagcagggctggtgcaagggacgcttggacaacgggcaagttggcctatacccggcaaattatgtggaggcgatccagtga

SEQ ID NO: 420 - DNA, 1233 bp, Homo sapiens;
atggtgctgtcccagagacaacgagatgaactaaatcgagctatagcagattatcttcgttcaaatggctatgaagaggcatattcagtttttaaaaaggaagctgaattagatgtgaatgaagaattagataaaaagtatgctggtcttttggaaaaaaaatggacatctgttattagattacaaaagaaggttatggaattagaatcaaagctaaatgaagcaaaagaagaatttacgtcaggtggacctcttggtcagaaacgagacccaaaagaatggattccccgtccgccagaaaaatatgcattgagtggtcacaggagtccagtcactcgagtcattttccatcctgtgttcagtgttatggtctctgcttcagaggatgctacaattaaggtgtgggattatgagactggagattttgaacgaactcttaaaggacatacagactctgtacaggacatttcattcgaccacagcggcaagcttctggcttcctgttctgcagatatgaccattaaactatgggattttcagggctttgaatgcatcagaaccatgcacggccatgaccacaatgtttcttcagtagccatcatgcccaatggagatcatatagtgtctgcctcaagggataaaactataaaaatgtgggaagtgcaaactggctactgtgtgaagacattcacaggacacagagaatgggtacgtatggtacggccaaatcaagatggcactctgatagccagctgttccaatgaccagactgtgcgtgtatgggtcgtagcaacaaaggaatgcaaggctgagctccgagagcatgagcatgtggtagaatgcatttcctgggctccagaaagctcatattcctccatctctgaagcaacaggatctgagactaaaaaaagtggtaaacctgggccattcttgctgtctggatccagagacaagactattaagatgtgggatgtcagtactggcatgtgccttatgaccctcgtgggtcatgataactgggtacgtggagttctgttccattctggggggaagtttattttgagttgtgctgatgacaagaccctacgcgtatgggattacaagaacaagcgatgcatgaagaccctcaatgcgcatgaacactttgttacctccttggatttccacaagacggcaccctatgtcgtcactggcagcgtagatcaaacagtaaaagtgtgggagtgccgttga

SEQ ID NO: 421 - DNA, 2106 bp, Homo sapiens;
atggcccaggccggcgtcgtcggtgaggtcacccaggtgctgtgcgcggccgggggcgccctggagttgcccgagctgcggcgccgcttgcggatgggcttgagcgccgacgcgctggagcggctgctgcggcagcgtgggcgcttcgtggtggcggtgcgggcgggcggcgcagccgcggccccggagcgcgtggtgctggccgcctcgccgctgcgcctgtgtcgcgcgcaccagggctccaagccgggctgcgtggggctctgcgcgcagctccacctctgcaggttcatggtctacggcgcctgcaagttcctgagagccgggaagaactgtaggaatagtcacagcttgacaaccgaacacaacctgagtgtgctgagaactcatggcgttgaccacctgagctataatgagctatgccaactcttgtttcagaacgacccctggcttttgccagaaatttgccaacattacaacaaaggagatggaccccacggctcttgtgcctttcaaaagcagtgcatcaagctccatatctgccagtattttttacagggggaatgcaagtttggcactagctgtaagagatcccatgatttctctaattctgagaatctggaaaaattggagaagttgggtatgagctcagacctggtgagcaggctgcctaccatttatagaaatgcacatgacatcaagaataagagctctgcccccagcagagtgcctcctctttttgtcccacaggggacttctgaaagaaaagacagttcaggttctgtgtccccaaacactcttagccaggaggagggtgatcagatctgtttgtaccatatccggaaaagttgtagctttcaagataagtgccatagagttcatttccatttgccgtatcgatggcaattcttggatagaggcaaatgggaggatttggacaacatggaacttattgaagaggcatattgcaatcccaaaatagaaaggatcctgtgctctgagtcagccagtacctttcactctcattgtctgaactttaacgccatgacttacggtgctacccaggctcgccgcctctccacggcctcctctgtcaccaaacctccacacttcatcctcaccactgactggatttggtactggagtgatgagtttggttcttggcaggaatatggaagacagggcacggtgcaccctgtgaccactgtcagcagtagcgacgtggagaaggcctacctggcctactgtacaccggggtctgacggccaggcagccaccttgaagttccaggccggaaagcacaactacgagttagatttcaaagccttcgttcagaaaaacctggtctatggcacaactaaaaaggtttgccgcagacccaaatacgtgtctccccaggatgtgacgaccatgcaaacctgcaataccaagtttccaggcccgaagagcatcccagactattgggactcctctgccctgccagacccaggctttcagaagatcacccttagttcttcctcggaagagtatcagaaggtctggaacctctttaaccgcacgctgcctttctactttgttcagaagattgagcgagtacagaacctggccctctgggaagtctaccagtggcaaaaaggacagatgcagaagcagaacggagggaaggccgtggacgagcggcagctgttccacggcaccagcgccatttttgtggacgccatctgccagcagaactttgactggcgggtctgtggtgttcatggcacttcctacggcaaggggagctactttgcccgagatgctgcatattcccaccactacagcaaatccgacacgcagacccacacgatgttcctggcccgggtgctggtgggcgagttcgtcaggggcaatgcctcctttgtccgtccgccggccaaggagggctggagcaacgccttctatgatagctgcgtgaacagtgtgtccgacccctccatctttgtgatctttgagaaacaccaggtctacccagagtatgtcatccagtacaccacctcctccaagccctcggtcacaccctccatcctgctggccttgggctccctgttcagcagccgacagtga

SEQ ID NO: 422 - DNA, 1305 bp, Homo sapiens;
atggacgatcaatccaggatgctgcagactctggccggggtgaacctggctggccactcggtgcaggggggcatggccctgccgcctcccccgcacggccacgaaggggcggacggcgacggcaggaagcaggacatcggcgacatcctccaccagatcatgaccatcaccgaccagagcttggacgaggcgcaagcaaagaaacatgccctgaactgtcacagaatgaaaccagcgctcttcagcgtcctgtgtgagatcaaagagaaaacaggtctcagcatcagaggagcccaggaggaggaccctcccgatccccagctaatgagactggacaatatgcttttggcagaaggggtttcaggtcctgagaaaggtgggggatcggcggcagcagctgcagccgcggcagcctctggaggttcttcagataactctattgaacactcagattacagagccaaattgacccagatcagacaaatctatcacacagaactggagaaatatgaacaggcatgtaatgaatttactacacatgtgatgaaccttctccgagaacagagtagaacacgtcccatttctccaaaagagattgaaagaatggtgggcatcatccatcgaaaatttagttccattcagatgcagctcaaacaaagcacttgtgaagcagttatgattttaagatcaaggttccttgatgccagacggaaaaggcgtaacttcagtaaacaggccacagaaatcttgaatgaatatttttactcacacctcagcaacccctaccccagtgaagaagccaaagaggagctggccaagaaatgcagcatcacagtgtcacaggtatccaattggtttggcaacaaacgaatcaggtacaagaagaacattggcaagtttcaggaagaagccaacctctatgctgcaaagacggccgtgacagctgcacacgcagtagcagcagctgtgcagaacaaccagaccaattcgcccaccacaccaaattccggttcttctggttcttttaacctcccaaattctggggacatgttcatgaacatgcagagtctgaatggggattcttaccaagggtcccaagtcggagccaatgtgcaatcacaggtggataccctccgtcatgttatcaatcagacgggaggctacagtgatggccttggaggaaattcactgtacagtccacataatttaaatgctaatggaggctggcaggacgcaacaactccatcttctgtgacttctcctacagaaggcccaggaagtgtgcactcggatacctctaactaa

SEQ ID NO: 423 - DNA, 1101 bp, Homo sapiens;
atggacaccggtgtgattgaaggtggattaaatgtcactctcaccatccggctacttatgcatggaaaggaagttggcagtatcatcggaaagaaaggagaatcagttaagaagatgcgcgaggagagtggtgcacgtatcaacatctcagaagggaattgtcctgagagaattatcactttggctggacccactaatgccatcttcaaagcctttgctatgatcattgacaaactggaagaggacataagcagctctatgaccaatagcacagctgccagtagacccccggtcaccctgaggctggtggtccctgctagtcagtgtggctctctcattggaaaaggtggatgcaagatcaaggaaatacgagagagtacaggggctcaggtccaggtggcaggggatatgctacccaactcaactgagcgggccatcactattgctggcattccacaatccatcattgagtgtgtcaaacagatctgcgtggtcatgttggagactctctcccagtcccccccgaagggcgtgaccatcccgtaccggcccaagccgtccagctctccggtcatctttgcaggtggtcaggacaggtacagcacaggcagcgacagtgcgagctttccccacaccaccccgtccatgtgcctcaaccctgacctggagggaccacctctagaggcctataccattcaaggacagtatgccattccacagccagatttgaccaagctgcaccagttggcaatgcaacagtctcattttcccatgacgcatggcaacaccggattcagtggcattgaatccagctctccagaggtgaaaggctattgggcaggtttggatgcatctgctcagactacttctcatgaactcaccattccaaacgatttgattggctgcataatcgggcgtcaaggcgccaaaatcaatgagatccgtcagatgtctggggcgcagatcaaaattgcgaacccagtggaaggatctactgataggcaggttaccatcactggatctgctgccagcattagcctggctcaatatctaatcaatgtcaggctttcctcggagacgggtggcatggggagcagctag

SEQ ID NO: 424 - DNA, 4668 bp, Homo sapiens;
atgtcagagcagacgccggccgaggccggtgctgcgggggcccgggaggacgcctgtcgggattatcagtcatcgctcgaagacctgaccttcaatagcaagccgcacatcaatatgctgaccattctagccgaggagaacctgcccttcgccaaggagatcgtctctctcatcgaggcccaaaccgccaaggctccttcctcagagaagcttcctgttatgtaccttatggattctattgtgaaaaacgttggaagagagtatctcactgcctttactaaaaatctagttgcaacatttatttgtgtgtttgaaaaggtggatgaaaatactaggaaaagtttatttaagttacgttctacatgggatgaaatattccctttgaagaaactttatgccctggatgtcagagtcaattcattagatcctgcttggcctattaaacctctaccccccaatgtgaatacgtctagcatccatgtgaatcctaaatttttaaataaatcgcccgaggagccttcaacacctggtacagtggtcagttcccctagcatctccactcctccaattgttcctgatatacaaaagaatcttacacaagaacaactaataaggcagcagttactggcaaagcaaaaacagttgttagaacttcagcagaaaaagctggagcttgagctagagcaagctaaggcacagttggcagtttctcttagtgttcagcaggaaacatccaatttaggtcctggatctgcaccatccaaattacatgtttcacagattccccctatggcagttaaagctcctcatcaggttcctgtgcaatctgagaaaagccgtccaggaccatccttacaaattcaggatttaaaaggaactaaccgggatcctcgtctgaacaggataagccaacattctcatggaaaagatcagagtcacaggaaagaatttctaatgaacacattaaaccagtctgatactaagacaagtaaaactataccctctgaaaaactaaattcatccaagcaagaaaaaagtaaatcaggtgaaaaaataaccaagaaagaacttgaccaattagattctaaatcgaaatcgaaatcgaaatcaccctcacctttgaaaaacaaattatctcacacaaaagacttgaaaaatcaagaatcggaaagtatgaggttgtctgatatgaacaagagagatccaagattaaaaaaacatcttcaggataagaccgatggcaaagatgatgatgtgaaagagaagagaaaaactgcagaaaaaaaggataaagatgagcacatgaagtcatccgaacacagactggctggaagtagaaataaaatcataaatggcattgtacaaaaacaggatacaataacagaagagtcagaaaaacaggggacaaaaccagggagatcgagtactagaaagcgatcaagatctcgatcacccaagtctaggtcaccaattatacattccccaaagagaagagataggcggtcacccaaacgaaggcaaagaagtatgtctccaacatcgacacctaaagctggaaagattcgccaatctggagctaagcagtcacatatggaagagtttacaccaccttctagggaagacagaaatgctaagagaagtactaaacaggatattcgggatccaaggcgaatgaaaaagactgaagaggagcgaccacaagaaactacaaatcagcattctacaaagtcaggcactgaaccaaaggagaatgtagaaaactggcaaagttccaagtctgccaaaagatggaaatctggttgggaagaaaataaaagcttacaacaggttgatgaacatagtaaacctcctcatctgaggcatagggagagctggtcaagcactaaaggaattttatcacctcgagccccaaagcagcaacagcatcgattaagtgtagatgccaatcttcagattcctaaagagttaactcttgcaagcaaaagagaattacttcaaaagacgagtgaacgtttagcatctggtgaaattacacaggatgacttccttgttgttgtgcatcaaattcgacagctatttcagtatcaagaaggtgtgcgagaagagcagagatctccattcaatgatcgttttccacttaagcgacctcgatatgaagattcagataaaccatttgtagatagtccagcatcaagattcgccggcctggatacaaatcagcgacttacagctttagctgaagacagaccgttatttgatggacctagtaggccatcagtagcaagagatggcccaacgaagatgatttttgaaggacccaataaattaagccctcgaattgatggacctcccacaccagcttctcttcggtttgatgggtcaccaggacaaatggggggaggaggccctttgagatttgaggggccacaaggtcagctaggaggtgggtgtcctttgagatttgaaggtcctccaggaccagtggggacacctctgcggtttgagggcccaattggtcaagcaggaggaggtggttttcggtttgaaggttcccctggtctgaggtttgagggatctccaggtggtttgagatttgagggaccaggaggccagcctgtgggtggtctgaggtttgagggacatcgtggtcaacctgtgggtggtctaaggtttgagggacctcatggtcagcctgtgggtggacttagatttgataatccccgaggtcagcctgtaggtggacttagatttgaggggggtcatggtccatcaggggctgcgattaggtttgatggacctcatggtcagccaggaggtggaatcagatttgagggccctttgctacagcaaggggttggaatgaggtttgagggcccccatggtcagtcagtagctggtctgagatttgagggacaacataatcaacttggtgggaaccttaggtttgagggtccacatggtcagccaggggttggtatcaggtttgaaggccctttagtccaacaaggaggtggaatgaggtttgagggtccttctgtaccaggaggtggcctgagaattgaagggcctctgggtcaaggtggtccaagatttgaaggttgtcatgctttaaggtttgatgggcagccaggtcagccgtcactcttgccaagatttgatggattacatggtcagccaggtcctagatttgaaaggactcctggtcagccaggccctcagaggtttgatggaccacctggacagcaggttcaacccagatttgacggtgtacctcaaagatttgatggtccacaacatcagcaagcatcaaggtttgatattcctcttggtcttcaaggcacaagatttgacaatcatccttcacaaaggcttgaatcagtatctttcaatcagactggtccatataatgatccacctggcaatgcttttaatgccccatcccaaggactacagttccaaagacatgaacaaatatttgattcacctcaaggaccaaattttaatggaccacatggccctggaaaccagagtttctctaatccacttaacagagcttctggacactattttgatgaaaaaaatcttcagagttctcaatttggaaactttggcaatatacctgctccaatgacagtaggaaatattcaggcatctcaacaggttctgagtggtgttgctcagccagtagcttttggtcaaggacaacagtttttaccagttcatccacaaaatcctggatttgttcagaatccttcaggagccctccctaaggcatatcctgataatcatctcagtcaggtggatgtaaatgaattgttttcaaaattgctaaaaacaggaattctcaaattgtcccaaactgattcagctacaacacaagtaagtgaagtaactgctcagcctccccctgaagaggaggaagatcaaaatgaagatcaagatgttccagatcttactaattttacagttgaagaattgaaacaacgttatgacagtgttataaatcgactgtacactggtattcagtgttactcttgtggaatgaggtttacaacatcacagacagatgtttatgcagatcatttggactggcattatcggcaaaatagaactgaaaaggatgttagccgaaaagtcactcatagacgttggtactacagtttaacagactggatagaatttgaggagatagctgatctggaagaacgggcaaagagccagttttttgaaaaggtgcatgaagaagttgtgctcaaaactcaagaggctgctaaagaaaaagagttccaaagtgtacctgctggaccagctggagcagttgagagttgtgaaatctgtcaagaacaatttgaacaatactgggatgaagaagaggaggaatggcatttgaaaaatgctattagagtagatggaaagatttatcatccatcatgttatgaagattatcaaaatacatcttcatttgattgtacaccatctcccagcaagacaccagttgaaaaccccttgaatattatgttgaacattgtcaaaaacgaattgcaggaaccctgtgacagtcccaaagttaaggaagaacgaattgatacaccaccagcttgtacagaggaaagcatagcaacaccctctgaaattaaaacagaaaatgacacagtcgagtcagtttaa

SEQ ID NO: 425 - DNA, 7026 bp, Homo sapiens;
atggggtcgcagacgctgcagatcctccgacagggggtgtgggccgcgctcagcgggggctggtactacgacccgcaccaggccaccttcgtgaacgcgctgcacctctacctgtggctctttctgctgggcctgcccttcaccctctacatggcccttccttctaccatgattatagtagcagtttattgtcctgtgatagctgctgttttcattgttctgaagatggtcaactatcgactacacagagcacttgatgctggagaagttgtagataggactgcaaatgagttcacggatcagcgaaccaaagctgaacaaggcaactgttcaaccaggagaaaagacagcaatggaccgagtgatcctggtggagggattgaaatgtctgagttcatccgagaggccacacccccagttggttgcagttccagaaattcttatgccggtctagatccaagcaaccagattggatctggttcctcgcgtcttggaacagcagcaactattaaaggagatacagacactgctaagacttctgatgatatcagtttaagtctgggccaaagttctagtctttgtaaggaaggaagtgaagaacaagatttggcagctgatcggaagctctttcgtcttgtctccaatgactccttcatctctattcagccttccttatcctcttgtggacaggacttgccaagggacttcagtgacaaagtgaacctgccaagtcataaccaccaccaccatgttgatcagtctctgtccagcgcctgtgacacagaagtagcttctcttgtacctttacactcacactcttatagaaaagaccaccggccgcgaggtgtaccacggacttctagctctgctgtggcttttccagacacttcactgaatgattttcccctttatcagcaaagacgtggattagatccagttagtgagttagaatcttccaagcctctttctggatccaaagaatccttggtggaaaattctggtttatctggggaatttcagcttgctggtgacttgaaaatcaatacttctcagccacccacaaaaagtgggaagagcaaacctttgaaagcagagaaaagcatggacagcttgaggagcctgagcacacggagtagtgggtcaacagaaagctactgcagtggaacggaccgggacactaacagtactgtcagcagctataaaagtgagcagaccagctcaactcacatagagagcatcctgtcagagcatgaggagtctcctaaagcaggaacaaaaagtgggaggaagaaagagtgctgtgcaggcccagaggagaagaatagctgtgccagtgacaaaaggactagcagtgaaaagattgctatggaagcgagtaccaacagtggggttcacgaggccaaggaccccaccccctctgatgagatgcacaaccagagaggtctcagcacctctgcatctgaagaagccaataaaaatccccatgcaaatgaatttacttcccaaggggacagaccacctgggaacactgcagaaaacaaagaagagaagagtgataagtcagctgtttctgtggattccaaagtgcgtaaagatgttggtggaaagcaaaaggaaggggatgttcgacctaaatcttctagcgtaatccatcggacagcttctgcccacaagtcaggcaggagacgcacaggaaaaaaacgggctagcagttttgattcaagccggcatagggactatgtttgctttcgaggtgtttctggtaccaagccacacagtgctatattttgtcatgacgaagactctagtgatcagagtgacttgagtagagcatcaagtgttcagtctgctcaccagttcagcagtgatagctcttctagcaccacttctcattcctgtcagtctcctgagggcagatacagtgctctaaagaccaaacacactcataaagaaaggggcacagactctgaacacacacacaaagctcatttggttcctgaaggaaccagcaaaaagcgtgcaacacgacggacttctagcacaaatagtgccaagactcgtgcccgagtgttgagcctggacagtggcacagtagcatgtttgaatgactcaaacaggttaatggcacctgaaagtataaagcccttaaccacttcaaaatcagatcttgaggccaaagagggagaggtgctagatgagctatctttattaggacgggcttcccagttagagacagtcactcgatctaggaatagcttgccaaaccaggttgcatttcctgaaggggaagagcaagatgcagtcagtggagcagcacaagccagcgaggaggcagtgtcatttcgccgtgaacgcagcacatttaggcgccaggcagtacggcgccggcacaatgcagggagtaaccctacccctcctacattgctcatcggatcacccctaagccttcaagatggtcagcaaggccagcagtccacagcccaggtcaaagtccagtcccgccccccttcccaggctgcagtgctcagtgctagtgcctccttgctggtgagaaatgggagtgtccacttagaagcatcacatgacaatgcatctgctgtaggcggtagcagtttgcacgatgaacttggtaagttctcttctacgctgtatgagactggtggctgtgatatgtcacttgtgaattttgaaccagcagcaagaagagcatccaatatctgtgacacagattctcatgtatccagttctacctcagttcgattttatccacatgatgtgctctctctcccacagattcgattgaatagactattgaccattgatacagatttgttggagcaacaggacattgatctaagccctgacttggcagctacttacggcccaacagaagaagctgcccaaaaggttaaacactattatcgcttttggatcctaccccagctgtggattggcattaactttgacagactcacacttttggccctgtttgatagaaatcgtgagatcctggaaaatgtgttagctgtcatcctggctattctcgtggcctttttgggatctattcttctcatacaaggattcttcagagatatctgggtcttccagttctgcctcgtcatagccagctgtcaatactcactgcttaagagtgttcaaccagattcttcttctcccagacatggtcataatcgtatcattgcctacagtagaccagtttatttctgcatatgttgcggtcttatttggctcttggattatggtagcagaaacctgactgcaaccaagttcaaattatatggaataactttcaccaatccactggtgtttatatcagccagggatttagttatagtgtttacactctgtttcccaatagtgtttttcattggtctcctgcctcaggtgaatacatttgtaatgtacctttgtgaacaattggatattcatatttttggtggtaatgccactacaagcctgcttgcagcactttacagttttatctgtagcattgttgcagtagccttattgtatggattatgttatggggctttaaaggattcttgggatggccagcatattccagtacttttctccattttttgtggtttattagtggcagtgtcttaccatctcagccgacaaagcagtgatccatctgtacttttctctttagtgcaatccaagatttttccaaaaacggaagagaaaaatccagaagaccctctatctgaagtaaaagatccactgcctgaaaaacttagaaattctgttagtgagcgattacagtctgacctggtagtatgcattgtaattggtgtgctgtattttgctattcatgtaagcacagtcttcacagtattgcagcctgccctcaagtatgtgttgtatacattggttggctttgtgggttttgtaacccattatgtgctgcctcaagttagaaaacagctaccatggcactgtttctctcatcctctgctaaagacactagagtataatcagtatgaagttcgaaatgcagccactatgatgtggtttgagaaacttcatgtgtggcttctttttgtggagaagaatataatctatccattgattgttctcaatgaactgagcagcagtgcagagacaattgctagtccaaagaaactgaatacagaattaggtgctttaatgatcactgttgctggtttgaagttgctacgatcctcttttagcagccctacatatcagtatgttacagtcatctttactgtgctgtttttcaaatttgactatgaagctttttcagagaccatgctgttggatctcttctttatgtccatactcttcaacaagctttgggaactactttataaattgcagtttgtgtatacctatattgccccatggcagatcacatggggttctgctttccatgcttttgctcagccttttgcagtgcctcattcagccatgctgtttattcaggctgctgtctcggccttcttctctactccactgaacccctttctgggaagtgcaatattcatcacttcatatgtccgacctgtgaaattctgggagagagactataacacaaaacgagtggatcattcaaataccagattggcttcccagcttgatagaaatccaggatcagatgacaacaatctgaattccatcttttatgagcatttaactagatccctacagcacagcctctgtggtgatttgctactaggacggtggggaaactacagtacaggggactgtttcatccttgcctctgactatctcaatgcattagtacaccttatagagataggcaatggtctggtcacttttcagctgcggggacttgaattcagaggtacctactgtcaacaacgggaagtggaggccattactgaaggtgtagaggaagatgaaggattttgctgttgtgaacctggccatattcctcacatgctttcatttaatgctgcatttagccagcgatggctagcttgggaagtgatagtcacaaagtacattctggagggttatagcatcactgataacagtgctgcttctatgcttcaagtctttgatcttcggaaagtactcaccacttactatgtcaagggtatcatttattatgttacgacctcgtctaagctagaggagtggctagctaatgagacaatgcaggaaggacttcgtctgtgtgctgatcgcaattatgtcgatgtggacccgacctttaatccaaacattgatgaagactatgaccaccgactggcaggcatatctagggagagtttctgtgtgatttacctcaactggatagagtactgctcttcccgaagagcaaagcctgtggatgtggacaaagattcatccctagtgactctctgttatggactctgtgttctgggacggagagctttggggactgcatcccatcatatgtccagtaatttagagtcattcctctatggattgcatgccctatttaaaggagatttccgtatttcttcaattcgagatgaatggatctttgctgacatggaattgctaagaaaagtagtagtccctgggatccgtatgtccattaaacttcatcaggatcattttacttctccagatgaatatgatgaccctactgtgctctatgaagccatagtatctcatgagaagaacctcgtaatagcccatgaaggggaccctgcatggcggagtgcagtacttgccaactctccctccttgcttgctctgcggcatgtcatggatgatggcaccaatgaatataaaatcatcatgctcaacagacgctacctgagcttcagggtcattaaagtgaataaggaatgtgtccgaggtctttgggcagggcaacagcaggagcttgtttttctacgtaaccgtaacccagagagaggtagcatccaaaatgcaaagcaagccctgagaaacatgataaactcatcttgtgatcaacctattggctacccaatctttgtctcacccctgacaacttcttactctgacagccacgaacagcttaaagacattcttgggggtcctatcagcttgggaaatatcaggaacttcatagtgtcaacctggcacaggcttaggaaaggttgcggagctggatgtaacagtggtggcaatattgaagattctgatactggaggtgggacttcctgcactggtaacaatgcaacaactgccaacaatccccacagcaacgtgacccagggaagcattggaaatcctgggcagggatcaggaactggactccacccacctgtcacatcttatcctccaacactaggcactagccacagctctcactctgtgcagtcgggcctggtcagacagtctcctgcccgggcctcagtagccagccagtcttcctactgctatagcagccggcattcatccctccggatgtccaccactgggtttgtgccttgtcggcgctcttctactagtcagatatcgcttcgaaacttgccatcatccatccaatcccgactgtcgatggtgaaccaaatggaaccctcaggtcagagcggcctggcctgtgtgcagcacggcctgccttcctccagcagctccagccaaagcatcccagcctgcaaacatcacactctcgtgggctttcttgcgacagagggaggtcagagcagtgccactgatgcacagccaggcaacaccttaagtcctgccaacaattcacactccagaaaggcagaagtgatttacagagtccaaattgtggatcccagtcaaattctggaagggatcaacctgtctaaaaggaaagagctacagtggcctgatgaaggaatccggttaaaagctgggagaaatagctggaaagactggagtccgcaggagggcatggaaggccatgtgattcaccgatgggtgccttgcagcagagatccaggtaccagatcccacatcgacaaggcagtgcttctggtccagattgatgataaatatgtgactgtaattgaaactggggtactagaacttggggctgaagtgtga

SEQ ID NO: 426 - DNA, 2607 bp, Homo sapiens;
atggcgacattcatctcggtgcagctgaaaaagacctcagaggtggacctggccaagccgctggtgaagttcatccagcagacttacccaagcggcggggaagagcaggcccagtactgccgcgcggcggaggagctcagcaagctgcgccgcgccgcagtcggtcgtccgctggacaagcacgagggcgcgctcgagacgctcctgagatattatgatcagatttgttctattgaacccaaattcccattttctgaaaatcagatctgcttgacatttacctggaaggatgctttcgataaaggttcactttttggaggctctgtaaaactggctcttgcaagcttaggatatgaaaagagctgtgtgttgttcaattgtgcagccttagctagccaaattgcagcagaacagaacctggataatgatgaaggattgaaaatcgctgctaaacattaccagtttgctagtggtgcctttttacatattaaagagacggttttatctgccttaagtcgagagccgaccgtggacatatctccagatactgttgggaccctcagtcttattatgctggcacaggctcaagaagtattttttttaaaagccacaagagataaaatgaaagatgccatcatagctaaattggctaatcaggctgcagattattttggtgatgctttcaaacagtgtcaatacaaagatactctccccaaggaggtgttccctgtcttggctgcaaagcactgtatcatgcaggccaatgctgagtaccatcagtctatcctggcaaaacagcagaagaaatttggagaagaaattgcaaggttacagcatgcagcagaactgattaaaacagtggcatctcgctatgatgaatatgttaatgtgaaggatttttctgacaaaatcaatcgtgcccttgctgcagcaaagaaggataatgacttcatttatcatgatcgagttccagaccttaaagatctagatcctattggcaaagccacacttgtgaaatctaccccggtcaatgtacccatcagtcagaaatttactgatctgtttgagaagatggttcccgtgtcagtacagcagtctttggctgcctataatcagaggaaagccgatttggttaacagatcaattgctcagatgagagaagccaccactttggcaaatggggtgctagcttcccttaatcttccagcagcaattgaagatgtgtctggagacactgtacctcagtctatattgactaaatccagatctgtgattgaacagggaggcatccagactgttgatcagttgattaaagaactgcctgaattactgcaacgaaatagagaaatcctagatgagtcattaaggttgttggatgaagaagaagcaaccgataatgatttaagagcaaaatttaaggaacgttggcaaaggacaccatccaatgaactgtataagcctttaagagcagagggaaccaacttcagaacagttttagataaagctgtgcaggcagatggacaagtgaaagaatgttaccagtctcatcgtgacaccatcgtgcttttgtgtaagccagagcctgagctgaatgctgccatcccttctgctaatccagcaaagaccatgcagggcagtgaggttgtaaatgtcttaaaatccttattgtcaaatcttgatgaagtaaagaaggaaagagagggtctggagaatgacttgaaatctgtgaattttgacatgacaagcaagtttttgacagccctggctcaagatggtgtgataaatgaagaagctctttctgttactgaactagatcgagtctatggaggtcttacaactaaagtccaagaatctctaaagaaacaggagggacttcttaaaaatattcaggtctcacatcaggaattttcaaaaatgaaacaatctaataatgaagctaacttaagagaagaagttttgaagaatttagctactgcatatgacaactttgttgaacttgtagctaatttgaaggaaggcacaaagttttacaatgagttgactgaaatcctggtcaggttccagaacaaatgcagtgatatagtttttgcacggaagacagaaagagatgaactcttaaaggacttgcaacaaagcattgccagagaacctagtgctccttcaattcctacacctgcgtatcagtcctcaccagcaggaggacatgcaccaactcctccaactccagcgccaagaaccatgccgcctactaagccccagcccccagccaggcctccaccacctgtgcttccagcaaatcgagctccttctgctactgctccatctccagtgggggctgggactgctgcgccagctccatcacaaacgcctggctcagctcctcctccacaggcgcagggaccaccctatcccacctatccaggatatcctgggtattgccaaatgcccatgcccatgggctataatccttatgcgtatggccagtataatatgccatatccaccagtgtatcaccagagtcctggacaggctccatacccgggaccccagcagccttcataccccttccctcagcccccacagcagtcttactatccacagcagtaa

SEQ ID NO: 427 - DNA, 3339 bp, Homo sapiens;
atgaggagggacgagcgagacgccaaagccatgcggtccctgcagccgccggatggggccggctcgccccccgagagtctgaggaacggctacgtgaagagctgcgtgagccccttgcggcaggaccctccgcgcggcttcttcttccacctctgccgcttctgcaacgtggagctgcggccgccgccggcctctccccagcagccgcggcgctgctcccccttctgccgggcgcgcctctcgctgggcgccctggctgcctttgtcctcgccctgctgctgggcgcggaacccgagagctgggctgccggggccgcctggctgcggacgctgctgagcgtgtgttcgcacagcttgagccccctcttcagcatcgcctgtgccttcttcttcctcacctgcttcctcacccggaccaagcggggacccggcccgggccggagctgcggctcctggtggctgctggcgctgcccgcctgctgttacctgggggacttcttggtgtggcagtggtggtcttggccttggggggatggcgacgcagggtccgcggccccgcacacgcccccggaggcggcagcgggcaggttgctgctggtgctgagctgcgtagggctgctgctgacgctcgcgcacccgctgcggctccggcactgcgttctggtgctgctcctggccagcttcgtctggtgggtctccttcaccagcctcgggtcgctgccctccgccctcaggccgctgctctccggcctggtggggggcgctggctgcctgctggccctggggttggatcacttctttcaaatcagggaagcgcctcttcatcctcgactgtccagtgccgccgaagaaaaagtgcctgtgatccgaccccggaggaggtccagctgcgtgtcgttaggagaaactgcagccagttactatggcagttgcaaaatattcaggagaccgtcgttgccttgtatttccagagaacagatgattctttgggattgggacttaaaacaatggtataagcctcattatcaaaattctggaggtggaaatggagttgatctttcagtgctaaatgaggctcgcaatatggtgtcagatcttctgactgatccaagccttccaccacaagtcatttcctctctacggagtattagtagcttaatgggtgctttctcaggttcctgtaggccaaagattaatcctctcacaccatttcctggattttacccctgttctgaaatagaggacccagctgagaaaggggatagaaaacttaacaagggactaaataggaatagtttgccaactccacagctgaggagaagctcaggaacttcaggattgctacctgttgaacagtcttcaaggtgggatcgtaataatggcaaaagacctcaccaagaatttggcatttcaagtcaaggatgctatctaaatgggccttttaattcaaatctactgactatcccgaagcaaaggtcatcttctgtatcactgactcaccatgtaggtctcagaagagctggtgttttgtccagtctgagtcctgtgaattcttccaaccatggaccagtgtctactggctctctaactaatcgatcacccatagaatttcctgatactgctgattttcttaataagccaagcgttatcttgcagagatctctgggcaatgcacctaatactccagatttttatcagcaacttagaaattctgatagcaatctgtgtaacagctgtggacatcaaatgctgaaatatgtttcaacatctgaatcagatggtacagattgctgcagtggaaaatcaggtgaagaagaaaacattttctcgaaagaatcattcaaacttatggaaactcaacaagaagaggaaacagagaagaaagacagcagaaaattatttcaggaaggtgataagtggctaacagaagaggcacagagtgaacagcaaacaaatattgaacaggaagtatcactggacctgattttagtagaagagtatgactcattaatagaaaagatgagcaactggaattttccaatttttgaacttgtagaaaagatgggagagaaatcaggaaggattctcagtcaggttatgtataccttatttcaagacactggtttattggaaatatttaaaattcccactcaacaatttatgaactattttcgtgcattagaaaatggctatcgagacattccttatcacaatcgtatacatgccacagatgtgctacatgcagtttggtatctgacaacacggccagttcctggcttacagcagatccacaatggttgtggaacaggaaatgaaacagattctgatggtagaattaaccatgggcgaattgcttatatttcttcgaagagctgctctaatcctgatgagagttatggctgcctgtcttcaaacattcctgcattagaattgatggctctatacgtggcagctgccatgcatgattatgatcacccagggaggacaaatgcatttctagtggctacaaatgcccctcaggcagttttatacaatgacagatctgttctggaaaatcatcatgctgcgtcagcttggaatctatatctttctcgcccagaatacaacttccttcttcatcttgatcatgtggaattcaagcgctttcgttttttagtcattgaagcaatccttgctacggatcttaaaaagcattttgattttctcgcagaattcaatgccaaggcaaatgatgtaaatagtaatggcatagaatggagtaatgaaaatgatcgcctcttggtatgccaggtgtgcatcaaactggcagatataaatggcccagcaaaagttcgagacttgcatttgaaatggacagaaggcattgtcaatgaattttatgagcagggagatgaagaagcaaatcttggtctgcccatcagtccattcatggatcgttcttctcctcaactagcaaaactccaagaatcttttatcacccacatagtgggtcccctgtgtaactcctatgatgctgctggtttgctaccaggtcagtggttagaagcagaagaggataatgatactgaaagtggtgatgatgaagacggtgaagaattagatacagaagatgaagaaatggaaaacaatctaaatccaaaaccaccaagaaggaaaagcagacggcgaatattttgtcagctaatgcaccacctcactgaaaaccacaagatatggaaggaaatcgtagaggaagaagaaaaatgtaaagctgatgggaataaactgcaggtggagaattcctccttacctcaagcagatgagattcaggtaattgaagaggcagatgaagaggaatag

SEQ ID NO: 428 - DNA, 2217 bp, Homo sapiens;
atgcagccgaggtgggcccaaggggccacgatgtggcttggagtcctgctgacccttctgctctgttcaagccttgagggtcaagaaaactctttcacaatcaacagtgttgacatgaagagcctgccggactggacggtgcaaaatgggaagaacctgaccctgcagtgcttcgcggatgtcagcaccacctctcacgtcaagcctcagcaccagatgctgttctataaggatgacgtgctgttttacaacatctcctccatgaagagcacagagagttattttattcctgaagtccggatctatgactcagggacatataaatgtactgtgattgtgaacaacaaagagaaaaccactgcagagtaccaggtgttggtggaaggagtgcccagtcccagggtgacactggacaagaaagaggccatccaaggtgggatcgtgagggtcaactgttctgtcccagaggaaaaggccccaatacacttcacaattgaaaaacttgaactaaatgaaaaaatggtcaagctgaaaagagagaagaattctcgagaccagaattttgtgatactggaattccccgttgaggaacaggaccgcgttttatccttccgatgtcaagctaggatcatttctgggatccatatgcagacctcagaatctaccaagagtgaactggtcaccgtgacggaatccttctctacacccaagttccacatcagccccaccggaatgatcatggaaggagctcagctccacattaagtgcaccattcaagtgactcacctggcccaggagtttccagaaatcataattcagaaggacaaggcgattgtggcccacaacagacatggcaacaaggctgtgtactcagtcatggccatggtggagcacagtggcaactacacgtgcaaagtggagtccagccgcatatccaaggtcagcagcatcgtggtcaacataacagaactattttccaagcccgaactggaatcttccttcacacatctggaccaaggtgaaagactgaacctgtcctgctccatcccaggagcacctccagccaacttcaccatccagaaggaagatacgattgtgtcacagactcaagatttcaccaagatagcctcaaagtcggacagtgggacgtatatctgcactgcaggtattgacaaagtggtcaagaaaagcaacacagtccagatagtcgtatgtgaaatgctctcccagcccaggatttcttatgatgcccagtttgaggtcataaaaggacagaccatcgaagtccgttgcgaatcgatcagtggaactttgcctatttcttaccaacttttaaaaacaagtaaagttttggagaatagtaccaagaactcaaatgatcctgcggtattcaaagacaaccccactgaagacgtcgaataccagtgtgttgcagataattgccattcccatgccaaaatgttaagtgaggttctgagggtgaaggtgatagccccggtggatgaggtccagatttctatcctgtcaagtaaggtggtggagtctggagaggacattgtgctgcaatgtgctgtgaatgaaggatctggtcccatcacctataagttttacagagaaaaagagggcaaacccttctatcaaatgacctcaaatgccacccaggcattttggaccaagcagaaggctagcaaggaacaggagggagagtattactgcacagccttcaacagagccaaccacgcctccagtgtccccagaagcaaaatactgacagtcagagtcattcttgccccatggaagaaaggacttattgcagtggttatcatcggagtgatcattgctctcttgatcattgcggccaaatgttattttctgaggaaagccaaggccaagcagatgccagtggaaatgtccaggccagcagtaccacttctgaactccaacaacgagaaaatgtcagatcccaatatggaagctaacagtcattacggtcacaatgacgatgtcagaaaccatgcaatgaaaccaataaatgataataaagagcctctgaactcagacgtgcagtacacggaagttcaagtgtcctcagctgagtctcacaaagatctaggaaagaaggacacagagacagtgtacagtgaagtccggaaagctgtccctgatgccgtggaaagcagatactctagaacggaaggctcccttgatggaacttag

SEQ ID NO: 429 - DNA, 465 bp, Homo sapiens;
atggcgcagtctattaacatcacggagctgaatctgccgcagctagaaatgctcaagaaccagctggaccaggaagtggagttcttgtccacgtccattgctcagctcaaagtggtacagaccaagtatgtggaagccaaggactgtctgaacgtgctgaacaagagcaacgaggggaaagaattactcgtcccactgacgagttctatgtatgtccctgggaagctgcatgatgtggaacacgtgctcatcgatgtgggaactgggtactatgtagagaagacagctgaggatgccaaggacttcttcaagaggaagatagattttctaaccaagcagatggagaaaatccaaccagctcttcaggagaagcacgccatgaaacaggccgtcatggaaatgatgagtcagaagattcagcagctcacagccctgggggcagctcaggctactgctaaggcctga

SEQ ID NO: 430 - DNA, 1671 bp, Homo sapiens;
atggcggtggcggcggcagctgcggcgggacccgtgttctggaggcgactgctgggcctcctgcctggccgcccagggctggccgcgctcctgggacgcctgtccgaccgcctcggcaggaaccgggaccgccagcgcaggaggtcaccatggctgttattggctcccttgctgtccccagctgttccccaggtcacctccccaccttgctgcctgtgtccagaaggcgtgcaccggttccagtggatcagaaacctggttccagaatttggagtctccagttctcacgttagggtgctttcttccccggcagagtttttcgagctcatgaaggggcagataagagtagccaagaggcgggtcgtgatggcatccctctacctggggacaggtcctttggaacaggagctggtggactgcctggaaagtactctagaaaagtcactccaagcaaagtttccttcaaatctcaaggtctccattctcttagacttcacgcggggctcacgaggccggaagaactcccgcacaatgctgctcccactcctgcggaggttcccagagcaggtccgagtctccctctttcacacgccgcacctccgtgggctgcttcggctcctcatccctgagcgcttcaacgagaccatcggcctccagcacattaaggtgtacctcttcgacaacagcgtcatcttgagcggtgcaaacctgagtgactcctacttcaccaaccgccaggaccgctacgtgttcctgcaggactgtgcggagattgccgacttcttcacggagctggtggacgcggtgggggatgtgtccctgcagctgcagggggacgacacggtgcaggtggtggatgggatggtgcatccttacaaaggggaccgggccgagtactgcaaggcagccaataagagggtcatggatgtgatcaactcagccaggacccgccagcagatgctgcatgcccagaccttccacagcaactctcttttgacccaggaagatgcagcagctgctggggatcgcagaccagcccctgacacctggatttatccgctgattcagatgaagcccttcgagattcaaatcgatgagattgtcactgagaccctgttgactgaggcggagcgcggggcaaaggtctacctcaccactggctatttcaacctgacccaggcctacatggacctggtcttgggcactcgggctgagtaccagatcctgctggcctcaccagaggtgaatggcttctttggggccaagggggtggccggcgccatcccagcggcctatgtgcacatcgagcgacagttcttcagtgaggtgtgcagcctgggacagcaggagcgggtccagcttcaggagtactggcggaggggctggacgttccacgccaaaggcctctggctgtacctggcagggagcagcctgccctgtctcacgctgattggctctcctaattttgggtacaggtcagttcaccgggacctggaggcccagattgcgatcgtgacggagaaccaggccctgcagcagcagcttcaccaggagcaagagcagctctacctgaggtcaggtgtggtgtcctctgccaccttcgagcagccgagtcgccaggtgaagctgtgggtgaagatggtgactccactgatcaagaacttcttctga

SEQ ID NO: 431 - DNA, 972 bp, Homo sapiens;
atgacctcagggaacggaaactctgcctccagcatcgccggcactgccccccagaatggtgagaataaaccaccacaggccattgtgaaaccccaaatcctgacgcatgttatcgaagggtttgtgatccaggagggggcggagcctttcccggtgggacgctcgtccctgctggtggggaatctcaagaagaagtatgcacaggggttcctgcctgagaaacttccacagcaggatcacaccaccaccactgactcggagatggaggagccctatctgcaagaatccaaagaggagggtgctcccctcaaactcaagtgtgagctctgtggccgggtggactttgcctataagttcaagcgttccaagcgcttctgttccatggcttgtgcaaagaggtacaacgtgggatgcaccaaacgggtgggacttttccactcagaccggagcaagctgcagaaggcaggagctgcgacccacaaccgccgtcgggccagcaaagccagtctgccaccacttaccaaggataccaagaagcagccaacaggcactgtgcccctttcggttactgctgctttgcagctaacacacagccaggaagactccagccgttgctcagataactcaagctatgaggaacccttgtcacccatctcagccagctcatctacttcccgccggcgacaaggccagcgggacctggagctccccgacatgcatatgcgggacctggtgggcatgggacaccacttcctgccaagtgagcccaccaagtggaatgtagaagacgtctacgaattcatccgctctctgccaggctgccaggagatagcagaggaattccgtgcccaggaaatcgacgggcaagccctgctgctgctcaaggaggaccacctgatgagcgccatgaacatcaagctggggcccgccctgaagatctacgcccgcatcagcatgctcaaggactcctag

SEQ ID NO: 432 - DNA, 996 bp, Homo sapiens;
atggcccaggcgtcgccgccccggcccgagagggtgctcggcgccagcagcccggaggcccggcccgcgcaggaggcgctcctccttcccaccggtgtctttcaggttgcagaaaagatggaaaaaaggacatgtgcactctgccccaaagatgtcgaatataatgtcctatactttgcacaatcagagaatatagctgctcatgagaattgtttgctgtattcttcaggacttgtggaatgtgaggatcaggatccacttaatcctgatagaagttttgatgtggaatcagtaaagaaagaaatccagagaggaaggaagttgaaatgcaaattttgtcataaaagaggagccaccgtgggatgtgatttaaaaaactgtaacaagaattaccactttttctgtgccaagaaggacgacgcagttccacagtctgatggagttcgaggaatttataaactgctttgccagcaacatgctcaattcccgatcatcgctcaaagtgctaaattttcaggagtgaaaagaaaaagaggaaggaagaaacccctctcaggcaatcatgtacagccacccgaaacaatgaaatgtaatacattcataagacaagtgaaagaagagcatggcagacacacagatgcaactgtgaaagttccttttcttaagaaatgcaaggaagcaggacttcttaattacttacttgaagaaatattagacaaagttcattcaattccagaaaaactcatggatgagactacttcagaatcagactatgaagaaatcgggagtgcactttttgactgtagattgttcgaagacacatttgtaaattttcaagcagcaatagagaaaaaaattcatgcatctcaacaaaggtggcagcagttgaaggaagagattgagctacttcaggacttaaaacaaaccttgtgctcttttcaagaaaatagagatcttatgtcaagttctacatcaatatcatccctgtcttattag

SEQ ID NO: 433 - DNA, 3291 bp, Homo sapiens;
atggcgacggtgcccgtgtactgcgtctgccggctcccctacgacgttacccgcttcatgatcgagtgcgacgcctgcaaggactggttccacggcagctgtgttggggtggaagaggaggaggcgcccgacatcgacatataccactgcccaaactgtgagaaaacccatgggaagtccaccttaaagaagaagcggacctggcacaaacacggcccggggcaagcgcctgacgtcaagcccgtgcagaatggcagccagctcttcatcaaggagctgcggagccggacctttcccagtgctgaagacgtggtggcccgtgtgccaggaagtcagctcacgctgggctacatggaggagcacggcttcaccgagcccatcctcgtccctaagaaagacgggctgggtctggctgtcccggcccccacgttctatgtcagtgacgtcgagaactacgtggggccggaacggagtgtggatgtgacagatgtcaccaagcagaaggactgcaagatgaagctgaaggagtttgtggactattactacagcaccaaccgcaagcgggtcctcaacgtcaccaacctcgagttctctgacacccgaatgtccagcttcgtggagccacctgacattgtaaagaaactgtcatgggtagaaaactactggccagatgatgcattgctggccaagcccaaagtgaccaagtactgcctaatctgcgtgaaggacagttacaccgacttccacatcgactctgggggcgcctctgcctggtaccacgtgctcaagggggagaagaccttctatctcatcaggccggcctcggccaacatctccctgtatgagcgctggcggtctgcctctaaccacagcgagatgttctttgctgaccaggtcgacaaatgctacaagtgcatcgtcaagcagggccagaccctcttcatcccctcaggctggatctacgccacactcacccctgtggactgcctggccttcgcgggacatttcctccacagcctgagtgtggagatgcagatgagagcatatgaagtggaaaggaggttgaaactgggcagcctgactcagtttcccaactttgaaactgcgtgctggtacatggggaagcacctgctggaggcattcaaaggctctcacaaatctgggaagcagctgccccctcatctagtccaaggagctaaaattctcaatggtgctttccgatcgtggacgaagaagcaggctttggcagagcatgaggacgagctcccggagcacttcaaaccttcacagctaatcaaagacctggccaaagagatccggctcagtgagaatgcctccaaagccgtccgaccggaagtgaatactgtcgcctcgtcagatgaggtgtgtgacggggaccgggagaaggaggagcccccgtctcccattgaggccaccccgcctcaatccctcctggagaaagtgtccaaaaaaaagactcccaaaactgtgaagatgcccaagccatccaaaatccccaagcccccgaagccccctaagcccccaaggccccccaaaacgctgaagctcaaagatggaggcaagaagaaagggaagaagtcccgggagtcagcctcacccaccatccccaacctggacctgctcgaagcccacaccaaggaggcactgaccaagatggagccgcccaagaagggcaaggccacaaagagtgtcctgagtgtgcccaacaaagatgtggttcacatgcagaatgatgtggagaggctggaaattcgagagcaaaccaagagcaagtcagaggccaagtggaagtacaagaacagcaaacctgactccttactgaagatggaagaggagcagaagctagagaagtcgcctctagctggaaacaaagacaataagttctctttttctttctccaacaagaaactcctcggctccaaggctctcaggcccccgacgagccctggtgtgttcggggccttgcagaacttcaaggaggacaagcccaagcccgtgcgggatgagtatgagtacgtgtcggatgacggtgagctcaagatcgacgagtttcccatcaggaggaagaaaaacgccccgaaaagggacttgtccttcttgttggataagaaggctgtgctgcccacgcctgtcacgaagccaaagctggactcggcagcgtacaagagtgatgactcctcggacgagggttcgctgcacatcgacacagacaccaagcccggccgcaatgccagagtcaagaaggagagtgggagctcggcagctggcatcttggacctgctgcaggccagtgaggaggttggcgcgctggagtacaaccccagcagccagcccccggcctcccccagcacacaggaagccattcagggaatgctgtccatggccaacctgcaggcctccgactcctgcctgcagaccacgtggggagctggccaggccaaggggagctcgctggctgcccatggtgcccggaagaatgggggtggcagtggcaagagtgcaggcaaacgactgctgaagagggctgccaagaacagtgtcgacctggacgactacgaggaagagcaggaccacctggatgcctgcttcaaggactcagactacgtttacccctcactggagtcagatgaagacaaccccatctttaagtcccggtcgaagaaaaggaaaggctcagacgacgctccctacagcccaacagcaagggtcggcccatcggtgccaagacaggacaggcctgtgcgtgagggtacacgggtggcttccatcgagaccgggctggcggctgctgcagctaagttgtcccagcaggaggagcagaaaagcaagaaaaaaaagagtgccaagaggaagctgactcctaacaccacctccccttccacctccacctccatctctgccggcaccacctccacctccaccacgccagcctctaccaccccggcctccaccaccccggcctccaccagcacggccagcagccaggcctcgcaggagggcagctcgccagagcccccgcctgagtcgcatagcagcagcctggcggaccatgagtacacagccgctggcaccttcaccggggcccaggctggccgcacctcccagcccatggcccctggggtctttctcacacagaggcggccctccgcatcgtctccaaacaacaacaccgctgccaaaggaaaacgtacgaaaaagggcatggcgaccgccaagcagaggcttgggaaaattttgaaaattcatcggaacgggaaactactcctttaa

SEQ ID NO: 434 - DNA, 3039 bp, Homo sapiens;
atgacaaagcatccacctaacagacgaggaatcagctttgaagtgggagcccagttggaagcccgggaccgtttaaaaaactggtatccagctcacatagaagacattgactacgaggaaggaaaagtactcatccatttcaagcgttggaaccatcgttatgatgagtggttctgctgggacagtccttatttacgccctttagagaaaatacagctgaggaaagagggcttgcatgaagaggatggatcttctgaatttcaaataaatgagcaggtccttgcttgctggtctgattgtcgtttttacccggccaaagtcactgctgttaacaaggatggtacttacactgtgaaattttatgatggagtagttcagactgtcaaacatattcatgtcaaagctttttccaaagatcagaatattgtgggtaatgctaggcctaaagaaacagatcacaaaagtctttcatcatctcctgataaacgagagaagtttaaagaacagagaaaagcaacagtgaatgtgaagaaagacaaagaagataaacccttaaagacagaaaagcgacccaagcagcctgataaagaaggaaagttaatctgttctgaaaaggggaaagtgtcagagaaaagtcttcccaagaacgagaaggaagacaaggaaaacatttccgaaaatgacagagagtattctggagatgcccaagtggataagaaacctgaaaatgacattgtgaagagtccacaagaaaacttgagggaacccaaaagaaaacgaggcagacccccttccatagctcctactgctgtggattcaaactctcaaactttgcaaccaataacattggaactgagaagaaggaaaatatcaaaaggatgtgaagtcccattaaaacgtcctcggcttgacaaaaattcatcccaggaaaagtcaaaaaactactcggaaaacactgacaaagacttatcgaggagacgttcctccaggctgtccactaatgggacccatgagatcctagatcctgacttggttgtatcagatttggttgatacggatcctttgcaagacacgttgtctagtaccaaggaatctgaagaaggtcagttgaagtctgctttggaagctggccaggtctcatctgcactgacttgccactcctttggggatggatccggggctgcaggcttggagttgaactgcccatcaatgggagaaaacacgatgaaaacagaaccgacttctccccttgtggaattacaagagatttcgactgtggaagtaacaaatacttttaagaaaacagatgattttgggtcatctaatgcaccagctgtcgacctagaccataagtttagatgcaaagttgtggactgtttaaaatttttccgcaaagccaaactgttgcactatcacatgaagtatttccatggaatggagaagtcactggagccagaagagagcccgggaaagaggcatgtccaaaccaggggcccttcagcttcagacaagcccagccaggagaccctgaccaggaagcgggtctctgccagttccccaactacaaaagacaaggaaaagaataaagagaagaaattcaaggagtttgtgagagtgaagccaaagaagaaaaagaaaaagaaaaagaaaaccaaacctgaatgcccctgcagtgaggagatcagtgacacctcccaggaaccttctccacccaaggcatttgctgttaccaggtgtgggtcctcacacaagccaggggtccatatgagcccgcagcttcatggcccagaatctggacaccacaaagggaaagtgaaagcattggaggaggataatttgagtgagtcctcttctgagagctttctctggagtgatgatgagtatggccaagatgtggatgtgaccaccaacccagatgaggaacttgatggggatgaccgctatgacttcgaggtggtccgctgcatctgtgaggtccaggaggaaaatgacttcatgattcagtgtgaagagtgccagtgctggcagcatggggtctgcatgggattactggaagaaaatgtgcccgagaaatacacctgttatgtttgccaagaccctccaggtcagaggcctggcttcaagtactggtatgacaaggagtggctgagcaggggacatatgcatggcctggcatttctagaagagaactactcccatcagaatgccaagaagatcgtggccacccaccagcttcttggtgatgtgcagagagtgattgaggttctgcatggcctgcagctcaagatgagcatcttgcaaagccgggagcatcctgatctgccgctgtggtgccagccttggaaacagcactcaggggaggggagatctcatttcagaaacatccctgtcactgacaccaggagcaaggaggaagctccaagctatagaactttgaacggggcagtggagaagcccaggcccctggccctgcccctgccgcgttctgtggaggaatcctatatcaccagtgagcattgctaccagaagccccgcgcctattaccctgccgtggagcagaagctggtggtggagacgaggggctctgccctcgacgatgcggtcaaccccctccatgagaacggcgatgattccctttccccgcgcctgggctggcctctagaccaagacaggagcaagggggacagtgaccccaaacccggctccccaaaggtgaaggaatatgtctccaaaaaggccctaccagaagaagcccctgctcggaagctgctggacagaggtggagaggggctgctgagctcccagcaccagtggcagtttaacctgctgacccatgtggaatctcttcaggatgaagttacgcacaggatggactccattgagaaggagttggatgtgttggagagctggctggactacactggggaactggagccccctgagccgctggccaggcttccgcagctcaagcattgtatcaagcagctgctgatggacctgggcaaggtgcagcagatcgccctctgctgctcaacatga

SEQ ID NO: 435 - DNA, 3054 bp, Homo sapiens;
atgagtaaaaagcccccaaatcgccctggaatcacttttgagattggtgctcgtttggaggcactggactacttacaaaaatggtatccatcacgaattgaaaaaattgactatgaggagggcaagatgttggtccattttgagcgctggagtcatcgttatgatgagtggatttactgggatagcaatagattgcgaccccttgagagaccagcactaagaaaagaagggctaaaagatgaggaagatttctttgattttaaagctggagaagaagttctggctcgttggacagactgtcgctattaccctgccaagattgaagcaattaacaaagaaggaacatttacagttcagttttatgatggagtaattcgttgtttaaaaagaatgcacattaaagccatgcccgaggatgctaaggggcaggtgaaatcccagcatccactaagctggtgttgtcctatcgacccagctggatcgtgtaaccagtctatgggaagtgaggattggatagctttagtcaaagcagctgctgcagctgcagccaagaacaaaacagggagtaaacctcgaaccagcgctaacagcaataaagataaggataaagatgagagaaagtggtttaaagtaccttcaaagaaggaggaaacttcaacttgtatagccacaccagacgtagagaagaaggaagatctgcctacatctagtgaaacatttggacttcatgtagagaacgttccaaagatggtctttccacagccagagagcacattatcaaacaagaggaaaaataatcaaggcaactcgtttcaggcaaagagagctcgacttaacaagattactggtttgttggcatccaaagctgttggggttgatggtgctgaaaaaaaggaagactacaatgaaacagctccaatgctggagcaggcgatttcacctaaacctcaaagtcagaaaaaaaatgaagctgacattagcagttctgccaacactcagaaacctgcactgttatcctcaactttgtcttcagggaaggctcgcagcaagaaatgcaaacatgaatctggagattcttctgggtgtataaaaccccctaaatcaccactttccccagaattaatacaagtcgaggatttgacgcttgtatctcagctttcttcttcagtgataaataaaactagtcctccacagcctgtgaatccccctagacctttcaagcatagtgagcggagaagaagatctcagcgtttagccaccttacccatgcctgatgattctgtagaaaaggtttcttctccctctccagccactgatgggaaagtattctccatcagttctcaaaatcagcaagaatcttcagtaccagaggtgcctgatgttgcacatttgccacttgagaagctgggaccctgtctccctcttgacttaagtcgtggttcagaagttacagcaccggtagcctcagattcctcttaccgtaatgaatgtcccagggcagaaaaagaggatacacagatgcttccaaatccttcttccaaagcaatagctgatggaagaggagctccagcagcagcaggaatatcgaaaacagaaaaaaaagtgaaattggaagacaaaagctcaacagcatttggtaagagaaaagaaaaagataaggaaagaagagagaagagagacaaagatcactacagaccaaaacagaagaagaagaaaaaaaagaaaaagaaatctaagcaacatgactattcagactatgaagacagttccctcgaatttttggaaaggtgctcttctccactaactcgatcttctgggagttctctggcttcacgaagcatgtttacggagaaaactacaacctatcagtacccaagggcaattctatccgttgatcttagtggtgaaaacttatcagatgtagacttcctagatgattcttcaacggagagtttgcttctgagtggggatgaatacaatcaggactttgattcaaccaattttgaggaatctcaggatgaggatgatgctcttaatgaaattgtgcgatgtatttgtgagatggatgaggagaatggcttcatgatccagtgtgaagagtgcttgtgttggcaacacagcgtgtgcatggggctgctggaggagagcattccagagcagtacatctgctatatctgccgggacccaccaggtcagaggtggagtgcaaaatatcgttatgataaggagtggttgaataatgggagaatgtgcgggttatcatttttcaaagaaaattattctcatctcaatgccaaaaagatagtttctacacatcacctgcttgctgatgtctatggtgttacagaagtgctacacgggctacagctgaagattggaatactaaagaataaacatcatcctgaccttcatctctgggcttgttccgggaagcgaaaagaccaagatcaaataatagctggggtggagaaaaaaatagctcaagacacagttaatcgagaagaaaagaaatatgtacagaaccataaagaaccacctcgtttgcccctaaaaatggaaggaacttatataacaagtgagcatagctatcaaaagccacaaagttttggtcaggactgtaaatctctcgcagaccctgggagctcagatgatgatgatgttagtagtttggaagaagaacaagaattccacatgagaagtaaaaacagtttacagtactcagcaaaagaacatggaatgcctgaaaagaatccagctgaagggaatacagtatttgtttataatgataaaaagggcaccgaagacccaggagactcacatcttcagtggcagctcaatctccttacacacatagaaaatgtgcagaacgaagttaccagcaggatggacctaatagaaaaagaagtcgatgttctggaaagctggcttgatttcacaggggagttggagccaccagatcctcttgcaagattgccccaacttaaacgccacataaaacagctcctaattgacatgggcaaagtacagcagatagcaactctttgctctgtatga

SEQ ID NO: 436 - DNA, 6120 bp, Homo sapiens;; identical to SEQ ID NO: 62

SEQ ID NO: 437 - DNA, 1956 bp, Homo sapiens;
atggcggacagtgcggaactaaagcaaatggttatgagccttagagtttctgaactccaagtactgttgggctacgccgggagaaacaagcacggacgcaaacacgaacttctcacaaaagccctgcatttgctaaaggctggctgtagtcctgctgtgcaaatgaaaattaaggaactctataggcggcggttcccacagaaaatcatgacgcctgcagacttgtccatccccaacgtacattcaagtcctatgccagcaactttgtctccatctaccattccacaactcacttacgatggtcaccctgcatcatcgccattactccctgtttctcttctgggacctaaacatgaactggaactcccacatcttacatcagctcttcacccagtccatccggatataaaacttcaaaaattaccattttatgatttactggatgaactgataaaacccaccagtctagcatcagacaacagtcagcgctttcgagaaacctgttttgcatttgccttgacaccacaacaagtgcagcaaatcagtagttccatggatatttctgggaccaaatgtgacttcacagtacaggtccagttaaggttttgtttatcagaaaccagttgtccacaagaagatcacttcccacccaatctttgtgtgaaagtgaatacaaaaccttgcagccttccaggttaccttccacctacaaaaaatggcgtggaaccaaagcgacccagccgaccaattaatatcacctcacttgtccgactgtccacaacagtaccaaacacgattgttgtttcttggactgcagaaattggaagaaactattccatggcagtatatcttgtaaaacagttgtcctcaacagttcttcttcagaggttacgagcaaagggaataaggaatccggatcattctagagctttaattaaagagaagttgactgcggatccagacagtgaaatagctacaaccagcctaagggtttctctactatgtccacttggtaaaatgcggctgacaattccgtgtcgggcccttacatgttctcatctacaatgttttgacgcaactctttacattcagatgaatgagaaaaaaccaacctgggtttgtcctgtctgtgataagaaggctccatatgaacaccttattattgatggcttgtttatggaaatcctaaagtactgtacagactgtgatgaaatacaatttaaggaggatggcacttgggcaccgatgagatcaaaaaaggaagtacaggaagtttctgcctcttacaatggagtcgatggatgcttgagctccacattggagcatcaggtagcgtctcaccaccagtcctcaaataaaaacaagaaagtagaagtgattgacctaaccatagacagttcatctgatgaagaggaagaagagccatctgccaagaggacctgtccttccctatctcccacatcaccactaaataataaaggcattttaagtcttccacatcaagcatctccagtatcccgcaccccaagccttcctgctgtagacacaagctacattaatacctccctcatccaagactataggcatcctttccacatgacacccatgccttacgacttacaaggattagatttctttcctttcttatcaggagacaatcagcattacaacacctccttgcttgccgctgcagcagcagcagtttcagatgatcaagacctcctacactcgtctcggtttttcccgtatacctcctcacagatgtttcttgatcagttaagtgcaggaggcagtacttctctgccaaccaccaatggaagcagtagtggcagtaacagcagcctggtttcttccaacagcctaagggaaagccatagccacaccgtcacaaacaggagcagcacggacacggcatccatctttggcatcataccagacattatttcattggactga

SEQ ID NO: 438 - DNA, 792 bp, Homo sapiens;
atgctgttggcctgggtacaagcattcctcgtcagcaacatgctcctagcagaagcctatggatctggaggctgtttctgggacaacggccacctgtaccgggaggaccagacctcccccgcgccgggcctccgctgcctcaactggctggacgcgcagagcgggctggcctcggcccccgtgtcgggggccggcaatcacagttactgccgaaacccggacgaggacccgcgcgggccctggtgctacgtcagtggcgaggccggcgtccctgagaaacggccttgcgaggacctgcgctgtccagagaccacctcccaggccctgccagccttcacgacagaaatccaggaagcgtctgaagggccaggtgcagatgaggtgcaggtgttcgctcctgccaacgccctgcccgctcggagtgaggcggcagctgtgcagccagtgattgggatcagccagcgggtgcggatgaactccaaggagaaaaaggacctgggaactctgggctacgtgctgggcattaccatgatggtgatcatcattgccatcggagctggcatcatcttgggctactcctacaagagggggaaggatttgaaagaacagcatgatcagaaagtatgtgagagggagatgcagcgaatcactctgcccttgtctgccttcaccaaccccacctgtgagattgtggatgagaagactgtcgtggtccacaccagccagactccagttgaccctcaggagggcaccaccccccttatgggccaggccgggactcctggggcctga

SEQ ID NO: 439 - DNA, 1746 bp, Homo sapiens;
atggcggtgcgacaggcgctgggccgcggcctgcagctgggtcgagcgctgctgctgcgcttcacgggcaagcccggccgggcctacggcttggggcggccgggcccggcggcgggctgtgtccgcggggagcgtccaggctgggccgcaggaccgggcgcggagcctcgcagggtcgggctcgggctccctaaccgtctccgcttcttccgccagtcggtggccgggctggcggcgcggttgcagcggcagttcgtggtgcgggcctggggctgcgcgggcccttgcggccgggcagtctttctggccttcgggctagggctgggcctcatcgaggaaaaacaggcggagagccggcgggcggtctcggcctgtcaggagatccaggcaatttttacccagaaaagcaagccggggcctgacccgttggacacgagacgcttgcagggctttcggctggaggagtatctgatagggcagtccattggtaagggctgcagtgctgctgtgtatgaagccaccatgcctacattgccccagaacctggaggtgacaaagagcaccgggttgcttccagggagaggcccaggtaccagtgcaccaggagaagggcaggagcgagctccgggggcccctgccttccccttggccatcaagatgatgtggaacatctcggcaggttcctccagcgaagccatcttgaacacaatgagccaggagctggtcccagcgagccgagtggccttggctggggagtatggagcagtcacttacagaaaatccaagagaggtcccaagcaactagcccctcaccccaacatcatccgggttctccgcgccttcacctcttccgtgccgctgctgccaggggccctggtcgactaccctgatgtgctgccctcacgcctccaccctgaaggcctgggccatggccggacgctgttcctcgttatgaagaactatccctgtaccctgcgccagtacctttgtgtgaacacacccagcccccgcctcgccgccatgatgctgctgcagctgctggaaggcgtggaccatctggttcaacagggcatcgcgcacagagacctgaaatccgacaacatccttgtggagctggacccagacggctgcccctggctggtgatcgcagattttggctgctgcctggctgatgagagcatcggcctgcagttgcccttcagcagctggtacgtggatcggggcggaaacggctgtctgatggccccagaggtgtccacggcccgtcctggccccagggcagtgattgactacagcaaggctgatgcctgggcagtgggagccatcgcctatgaaatcttcgggcttgtcaatcccttctacggccagggcaaggcccaccttgaaagccgcagctaccaagaggctcagctacctgcactgcccgagtcagtgcctccagacgtgagacagttggtgagggcactgctccagcgagaggccagcaagagaccatctgcccgagtagccgcaaatgtgcttcatctaagcctctggggtgaacatattctagccctgaagaatctgaagttagacaagatggttggctggctcctccaacaatcggccgccactttgttggccaacaggctcacagagaagtgttgtgtggaaacaaaaatgaagatgctctttctggctaacctggagtgtgaaacgctctgccaggcagccctcctcctctgctcatggagggcagccctgtga

SEQ ID NO: 440 - DNA, 1128 bp, Homo sapiens;
atgatgtgtcagtcagaggcgcggcaaggaccagagctccgcgcggcgaaatggttgcacttcccccagctggccctgaggcggaggctggggcagctgagctgcatgtccagacccgctctgaaactgcgctcctggcccttgaccgtcctctactacctcctgcccttcggcgccctcagaccgctcagccgggtgggatggaggcccgtaagcagggtggctttgtacaagtcagtgccaacgcgcttgctgtcacgggcctggggtcgcctcaatcaggtggagctgccacactggctgcgcaggcccgtctacagcctgtacatctggacgtttggggtgaacatgaaagaggccgctgtggaggacctgcatcactaccgcaacctcagcgagttcttccggcgcaagctgaagccgcaggcccggcctgtctgtggcctgcacagcgtgattagcccatcggatggaaggatcctcaactttgggcaggtgaagaactgtgaggtggagcaggtaaagggggtcacctactccctggagtcgttcctgggcccgcgtatgtgcacagaggacctgcccttcccaccagccgcgtcgtgtgactccttcaagaaccagctggtcacccgggaagggaatgagctctatcactgtgtcatctacctggcccctggggactaccactgcttccactcccccaccgactggactgtgtcccaccggcgccacttcccaggctccctgatgtcagtgaaccctggcatggctcgctggatcaaagagctcttctgccataacgagcgggtggtcctgacgggggactggaaacatggcttcttctcactgacagctgtgggggccaccaacgtgggctccattcgcatctactttgaccgggacctgcacacaaacagcccaaggcacagcaagggctcctacaatgacttcagcttcgtgacgcacaccaatagagagggcgtccccatgcgtaagggcgagcacctgggcgagttcaacctgggctccaccatcgtgctcatcttcgaggcccccaaggacttcaatttccagctgaaaacaggacagaaaatccgctttggggaagccctgggctcgctctag

SEQ ID NO: 441 - DNA, 813 bp, Homo sapiens;
atggtgctgctcaaggagtatcgagtaatcctgcctgtgtctgtagatgagtatcaagtggggcagctgtattctgtggctgaggccagtaaaaatgaaacgggtggtggcgaaggcgtggaggtcctggtgaatgagccctacgagaaggacggtgagaaaggccagtacacacacaagatctaccacctgcagagcaaagtacccacgtttgttcgaatgctggccccagagggagccctgaatatacacgagaaagcctggaatgcttacccctactgcagaaccgttattacaaatgagtacatgaaagaagactttctgattaaaattgaaacctggcacaaaccagatcttggcacgcaggagaatgtgcataagctggagcctgaggcgtggaaacacgtggaagccgtatatatagacattgcagatcgaagccaagtgctcagcaaggattacaaggcagaggaagacccagcaaaatttaaatctatcaaaacaggccgaggacccttgggccccaattggaagcaagagcttgtaaaccagaaggactgcccatatatgtgtgcatacaaactggtgaccgtcaagttcaagtggtggggcctgcagaacaaagtggagaacttcatccataagcaagagaggcgtctgtttacaaacttccacaggcagctgttctgttggctcgataagtgggttgacctgaccatggacgacattcgaaggatggaagaagagacgaagagacagctggatgaaatgagacaaaaggacccagtgaaaggaatgacagcagatgactaa

SEQ ID NO: 442 - DNA, 1230 bp, Homo sapiens;
atgatgaagaagaacaattccgccaagcggggacctcaggatggaaaccagcagcctgcaccgcccgagaaggtcggctgggtccggaaattctgcgggaaagggattttcagggagatttggaaaaaccgctatgtggtgctgaaaggggaccagctctacatctctgagaaggaggtaaaagatgagaaaaatattcaagaggtatttgacctgagtgactatgagaagtgtgaagagctccggaagtccaagagcaggagcaagaaaaatcatagcaagtttactcttgcccactccaaacagcccggtaacacggcacccaacctgatcttcctggcagtgagtccagaagagaaggaatcgtggatcaatgccctcaactctgccatcacccgagccaagaaccgtatcttggatgaggtcaccgttgaggaggacagctatcttgcccatcccactcgagacagggcaaaaatccagcactcccgccgccccccaacaaggggacacctaatggctgtggcttccacctctacctcggatgggatgctgaccttggacttgatccaagaggaagacccttcccctgaggaaccaacctcttgtgctgagagctttcgggttgacctggacaagtctgtggcccagctggcagggagccggcggagagcggactcagaccgcatccagccctccgcagaccgggcaagcagtctctcccgaccttgggaaaaaacagacaaaggggccacctacaccccccaggcacccaagaagttgacgcccacagagaaaggccgctgcgcctccctggaggagatcctatctcagcgggatgctgcctctgcccgcaccctccagctgcgggctgaggaacccccaacccctgccctccccaacccggggcagctgtcccggatccaggacctggtagcaaggaaactggaggagactcaggagcttctggcagaggttcagggactgggagatgggaagcgaaaggccaaggacccccctcggtctccgccggattctgagtcagagcagctgctgctggagacggaacggctgctgggagaggcatcatcgaattggagccaggcaaagagggtgctgcaggaggtcagggagctgagagacctgtacagacagatggacctgcagaccccggactcccacctcagacagaccaccccgcacagtcagtaccggaagagcctgatgtga

SEQ ID NO: 443 - DNA, 1473 bp, Homo sapiens;
atggaggaggagggtgtgaaggaagccggtgagaagcctcggggagcacagatggtggacaaggctggctggatcaagaagagcagtgggggcctcctgggtttctggaaagaccgatatctgctcctctgccaggcccagctgctggtctatgagaatgaggatgatcagaagtgtgtggagactgtggagctgggcagctatgagaagtgccaggaccttcgtgccctcctcaagcgaaaacaccgctttatcctgctgcgatccccagggaacaaggtcagcgacatcaaattccaggcacccaccggggaggagaaggaatcctggatcaaagccctcaatgaagggattaaccgaggcaaaaacaaggctttcgatgaggtaaaggtggacaagagctgcgccctggagcatgtgacacgggaccgggtgcgagggggccagcgacgccggccaccaacgagagtccacctgaaggaggtggccagtgcagcttctgacggtcttctgcgcctggatcttgatgttccggacagtgggccaccagtgtttgcccccagcaatcatgtcagtgaagcccaacctcgggagacaccccggcccctcatgcctcctaccaagcctttcctagcacctgagaccaccagccctggtgacagggtggagacccctgtgggggagagagccccaacccctgtctcagcaagctctgaggtctcccctgagagccaagaggactcagagaccccagcagaggaggacagtggctctgagcagcctcccaacagcgtcctgcctgacaaactgaaggtgagctgggagaaccccagcccccaggaggcccctgctgcagagagtgcagaaccgtcccaggcaccctgttctgagacttctgaggctgcccccagggagggtgggaagccccctacacccccacccaagatcttatcagagaaactgaaagcctccatgggtgagatgcaggcttctgggccacctgctccaggcacagtgcaggtctcagtgaatggcatggatgacagtcctgagcctgccaagccctctcaggctgagggcaccccaggaactcctccaaaggatgcaacaacatccacagcactgcccccctgggacctgccacctcagttccatccccgctgctcctcccttggggacttgcttggggaaggcccgcggcatcccttgcagcccagggaacggctatatcgggcccagctggaggtgaaggtggcctcggaacagacggagaaactgttgaacaaggtgctgggcagtgagccggcccctgttagtgccgaaacattgctcagccaggctgtggagcagctgaggcaggccacccaggtcctgcaggaaatgagagatttgggagagctgagccaggaagcacctgggctaagggagaagcggaaggagctggtgaccctctacaggagaagtgcaccctag

SEQ ID NO: 444 - DNA, 4707 bp, Homo sapiens;
atggaggtctcccggaggaaggcgccgccgcgccccccgcgccccgcagcgccactgcccctgctcgcctatctgctggcactggcggctcccggccggggcgcggacgagcccgtgtggcggtcggagcaagccatcggagccatcgcggcgagccaggaggacggcgtgtttgtggcgagcggcagctgcctggaccagctggactacagcctggagcacagcctctcgcgcctgtaccgggaccaagcgggcaactgcacagagccggtctcgctggcgccccccgcgcggccccggcccgggagcagcttcagcaagctgctgctgccctaccgcgagggggcggccggcctcggggggctgctgctcaccggctggaccttcgaccggggcgcctgcgaggtgcggcccctgggcaacctgagccgcaactccctgcgcaacggcaccgaggtggtgtcgtgccacccgcagggctcgacggccggcgtggtgtaccgcgcgggccggaacaaccgctggtacctggcggtggccgccacctacgtgctgcctgagccggagacggcgagccgctgcaaccccgcggcatccgaccacgacacggccatcgcgctcaaggacacggaggggcgcagcctggccacgcaggagctggggcgcctcaagctgtgcgagggcgcgggcagcctgcacttcgtggacgcctttctctggaacggcagcatctacttcccctactacccctacaactacacgagcggcgctgccaccggctggcccagcatggcgcgcatcgcgcagagcaccgaggtgctgttccagggccaggcatccctcgactgcggccacggccaccccgacggccgccgcctgctcctctcctccagcctagtggaggccctggacgtctgggcgggagtgttcagcgcggccgctggagagggccaggagcggcgctcccccaccaccacggcgctctgcctcttcagaatgagtgagatccaggcgcgcgccaagagggtcagctgggacttcaagacggccgagagccactgcaaagaaggggatcaacctgaaagagtccaaccaatcgcatcatctaccttgatccattccgacctgacatccgtttatggcaccgtggtaatgaacaggactgttttattcttggggactggagatggccagttacttaaggttattcttggtgagaatttgacttcaaattgtccagaggttatctatgaaattaaagaagagacacctgttttctacaaactcgttcctgatcctgtgaagaatatctacatttatctaacagctgggaaagaggtgaggagaattcgtgttgcaaactgcaataaacataaatcctgttcggagtgtttaacagccacagaccctcactgcggttggtgccattcgctacaaaggtgcacttttcaaggagattgtgtacattcagagaacttagaaaactggctggatatttcgtctggagcaaaaaagtgccctaaaattcagataattcgaagcagtaaagaaaagactacagtgactatggtgggaagcttctctccaagacactcaaagtgcatggtgaagaatgtggactctagcagggagctctgccagaataaaagtcagcccaaccggacctgcacctgtagcatcccaaccagagcaacctacaaagatgtttcagttgtcaacgtgatgttctccttcggttcttggaatttatcagacagattcaactttaccaactgctcatcattaaaagaatgcccagcatgcgtagaaactggctgcgcgtggtgtaaaagtgcaagaaggtgtatccaccccttcacagcttgcgacccttctgattatgagagaaaccaggaacagtgtccagtggctgtcgagaagacatcaggaggaggaagacccaaggagaacaaggggaacagaaccaaccaggctttacaggtcttctacattaagtccattgagccacagaaagtatcgacattagggaaaagcaacgtgatagtaacgggagcaaactttacccgggcatcgaacatcacaatgatcctgaaaggaaccagtacctgtgataaggatgtgatacaggttagccatgtgctaaatgacacccacatgaaattctctcttccatcaagccggaaagaaatgaaggatgtgtgtatccagtttgatggtgggaactgctcttctgtgggatccttatcctacattgctctgccacattgttcccttatatttcctgctaccacctggatcagtggtggtcaaaatataaccatgatgggcagaaattttgatgtaattgacaacttaatcatttcacatgaattaaaaggaaacataaatgtctctgaatattgtgtggcgacttactgcgggtttttagcccccagtttaaagagttcaaaagtgcgcacgaatgtcactgtgaagctgagagtacaagacacctacttggattgtggaaccctgcagtatcgggaggaccccagattcacggggtatcgggtggaatccgaggtggacacagaactggaagtgaaaattcaaaaagaaaatgacaacttcaacatttccaaaaaagacattgaaattactctcttccatggggaaaatgggcaattaaattgcagttttgaaaatattactagaaatcaagatcttaccaccatcctttgcaaaattaaaggcatcaagactgcaagcaccattgccaactcttctaagaaagttcgggtcaagctgggaaacctggagctctacgtcgagcaggagtcagttccttccacatggtattttctgattgtgctccctgtcttgctagtgattgtcatttttgcggccgtgggggtgaccaggcacaaatcgaaggagctgagtcgcaaacagagtcaacaactagaattgctggaaagcgagctccggaaagagatacgtgacggctttgctgagctgcagatggataaattggatgtggttgatagttttggaactgttcccttccttgactacaaacattttgctctgagaactttcttccctgagtcaggtggcttcacccacatcttcactgaagatatgcataacagagacgccaacgacaagaatgaaagtctcacagctttggatgccctaatctgtaataaaagctttcttgttactgtcatccacacccttgaaaagcagaagaacttttctgtgaaggacaggtgtctgtttgcctccttcctaaccattgcactgcaaaccaagctggtctacctgaccagcatcctagaggtgctgaccagggacttgatggaacagtgtagtaacatgcagccgaaactcatgctgagacgcacggagtccgtcgtcgaaaaactcctcacaaactggatgtccgtctgcctttctggatttctccgggagactgtcggagagcccttctatttgctggtgacgactctgaaccagaaaattaacaagggtcccgtggatgtaatcacttgcaaagccctgtacacacttaatgaagactggctgttgtggcaggttccggaattcagtactgtggcattaaacgtcgtctttgaaaaaatcccggaaaacgagagtgcagatgtctgtcggaatatttcagtcaatgttctcgactgtgacaccattggccaagccaaagaaaagattttccaagcattcttaagcaaaaatggctctccttatggacttcagcttaatgaaattggtcttgagcttcaaatgggcacacgacagaaagaacttctggacatcgacagttcctccgtgattcttgaagatggaatcaccaagctaaacaccattggccactatgagatatcaaatggatccactataaaagtctttaagaagatagcaaattttacttcagatgtggagtactcggatgaccactgccatttgattttaccagattcggaagcattccaagatgtgcaaggaaagagacatcgagggaagcacaagttcaaagtaaaagaaatgtatctgacaaagctgctgtcgaccaaggtggcaattcattctgtgcttgaaaaactttttagaagcatttggagtttacccaacagcagagctccatttgctataaaatacttttttgactttttggacgcccaggctgaaaacaaaaaaatcacagatcctgacgtcgtacatatttggaaaacaaacagccttcctcttcgcttctgggtaaacatcctgaagaaccctcagtttgtctttgacattaagaagacaccacatatagacggctgtttgtcagtgattgcccaggcattcatggatgcattttctctcacagagcagcaactagggaaggaagcaccaactaataagcttctctatgccaaggatatcccaacctacaaagaagaagtaaaatcttattacaaagcaatcagggatttgcctccattgtcatcctcagaaatggaagaatttttaactcaggaatctaagaaacatgaaaatgaatttaatgaagaagtggccttgacagaaatttacaaatacatcgtaaaatattttgatgagattctaaataaactagaaagagaacgagggctggaagaagctcagaaacaactcttgcatgtaaaagtcttatttgatgaaaagaagaaatgcaagtggatgtaa

SEQ ID NO: 445 - DNA, 1008 bp, Homo sapiens;
atgagcaaacggaaggcgccgcaggagactctcaacgggggaatcaccgacatgctcacagaactcgcaaactttgagaagaacgtgagccaagctatccacaagtacaatgcttacagaaaagcagcatctgttatagcaaaatacccacacaaaataaagagtggagctgaagctaagaaattgcctggagtaggaacaaaaattgctgaaaagattgatgagtttttagcaactggaaaattacgtaaactggaaaagattcggcaggatgatacgagttcatccatcaatttcctgactcgagttagtggcattggtccatctgctgcaaggaagtttgtagatgaaggaattaaaacactagaagatctcagaaaaaatgaagataaattgaaccatcatcagcgaattgggctgaaatattttggggactttgaaaaaagaattcctcgtgaagagatgttacaaatgcaagatattgtactaaatgaagttaaaaaagtggattctgaatacattgctacagtctgtggcagtttcagaagaggtgcagagtccagtggtgacatggatgttctcctgacccatcccagcttcacttcagaatcaaccaaacagccaaaactgttacatcaggttgtggagcagttacaaaaggttcattttatcacagataccctgtcaaagggtgagacaaagttcatgggtgtttgccagcttcccagtaaaaatgatgaaaaagaatatccacacagaagaattgatatcaggttgatacccaaagatcagtattactgtggtgttctctatttcactgggagtgatattttcaataagaatatgagggctcatgccctagaaaagggtttcacaatcaatgagtacaccatccgtcccttgggagtcactggagttgcaggagaacccctgccagtggatagtgaaaaagacatctttgattacatccagtggaaataccgggaacccaaggaccggagcgaatga

SEQ ID NO: 446 - DNA, 324 bp, Homo sapiens;
atgggccggaagcggctcatcactgattcctacccggttgtgaagaggagggaggggcccgctgggcacagcaagggggagctggcacccgagctaggggaggagccccagccccgcgacgaggaggaagcggagctggagctgctgaggcagtttgacctggcctggcagtacgggccctgcaccgggatcacacggctgcagcgctggtgtcgggccaagcagatgggcttggagcctcccccagaggtgtggcaggtgctgaagacccaccccggagacccccgcttccagtgcagtctctggcatctctatcccctatga

SEQ ID NO: 447 - DNA, 402 bp, Homo sapiens;
atggaagaggatcaggagctggagagaaaaatatctggattgaagacctcaatggctgaaggcgagaggaagacagccctggaaatggtccaggcagctggaacagatagacactgtgtgacatttgtattgcacgaggaagaccataccctaggaaattctctacgttacatgatcatgaagaacccggaagtggaattttgtggttacactacgacccatccttcagagagcaaaattaatttacgcattcagactcgaggtacccttccagctgttgagccatttcagagaggcctgaatgagctcatgaatgtctgccaacatgtgcttgacaagtttgaggccagcataaaggactataaggatcaaaaagcaagcagaaatgaatccacattctag

SEQ ID NO: 448 - DNA, 1326 bp, Homo sapiens;
atggagcagccacaggaggaagcccctgaggtccgggaagaggaggagaaagaggaagtggcagaggcagaaggagccccagagctcaatgggggaccacagcatgcacttccttccagcagctacacagacctctcccggagctcctcgccaccctcactgctggaccaactgcagatgggctgtgacggggcctcatgcggcagcctcaacatggagtgccgggtgtgcggggacaaggcatcgggcttccactacggtgttcatgcatgtgaggggtgcaagggcttcttccgtcgtacgatccgcatgaagctggagtacgagaagtgtgagcgcagctgcaagattcagaagaagaaccgcaacaagtgccagtactgccgcttccagaagtgcctggcactgggcatgtcacacaacgctatccgttttggtcggatgccggaggctgagaagaggaagctggtggcagggctgactgcaaacgaggggagccagtacaacccacaggtggccgacctgaaggccttctccaagcacatctacaatgcctacctgaaaaacttcaacatgaccaaaaagaaggcccgcagcatcctcaccggcaaagccagccacacggcgccctttgtgatccacgacatcgagacattgtggcaggcagagaaggggctggtgtggaagcagttggtgaatggcctgcctccctacaaggagatcagcgtgcacgtcttctaccgctgccagtgcaccacagtggagaccgtgcgggagctcactgagttcgccaagagcatccccagcttcagcagcctcttcctcaacgaccaggttacccttctcaagtatggcgtgcacgaggccatcttcgccatgctggcctctatcgtcaacaaggacgggctgctggtagccaacggcagtggctttgtcacccgtgagttcctgcgcagcctccgcaaacccttcagtgatatcattgagcctaagtttgaatttgctgtcaagttcaacgccctggaacttgatgacagtgacctggccctattcattgcggccatcattctgtgtggagaccggccaggcctcatgaacgttccacgggtggaggctatccaggacaccatcctgcgtgccctcgaattccacctgcaggccaaccaccctgatgcccagtacctcttccccaagctgctgcagaagatggctgacctgcggcaactggtcaccgagcacgcccagatgatgcagcggatcaagaagaccgaaaccgagacctcgctgcaccctctgctccaggagatctacaaggacatgtactaa

SEQ ID NO: 449 - DNA, 1365 bp, Homo sapiens;
atgtcctctggagccccacagaagagcagcccaatggccagtggagctgaggagaccccaggcttcctggacacgctcctgcaagacttcccagccctgctgaacccagaggaccctctgccatggaaggccccagggacggtgctcagccaggaggaggtggagggcgagctggctgagctggccatgggctttctgggcagcaggaaggccccgccaccacttgctgctgctctggcccacgaagcagtttcacagctgctacagacagacctttccgaattcaggaagttgcccagggaggaagaagaagaggaggaggacgatgacgaggaggaaaaggcccctgtgaccttgctggatgcccaaagcctggcacagagtttctttaaccgcctttgggaagtcgccggccagtggcagaagcaggtgccattggctgcccgggcctcacagcggcagtggctggtctccatccacgccatccggaacactcgccgcaagatggaggaccggcacgtgtccctcccttccttcaaccagctcttcggcttgtctgaccctgtgaaccgcgcctactttgctgtgtttgatggtcacggaggcgtggatgctgcgaggtacgccgctgtccacgtgcacaccaacgctgcccgccagccagagctgcccacagaccctgagggagccctcagagaagccttccggcgcaccgaccagatgtttctcaggaaagccaagcgagagcggctgcagagcggcaccacaggtgtgtgtgcgctcattgcaggagcgaccctgcacgtcgcctggctcggggattcccaggtcattttggtacagcagggacaggtggtgaagctgatggagccacacagaccagaacggcaggatgagaaggcgcgcattgaagcattgggtggctttgtgtctcacatggactgctggagagtcaacgggaccctggccgtctccagagccatcggggatgtcttccagaagccctacgtgtctggggaggccgatgcagcttcccgggcgctgacgggctccgaggactacctgctgcttgcctgtgatggcttctttgacgtcgtaccccaccaggaagttgttggcctggtccagagccacctgaccaggcagcagggcagcgggctccgtgtcgccgaggagctggtggctgcggcccgggagcggggctcccacgacaacatcacggtcatggtggtcttcctcagggacccccaagagctgctggagggcgggaaccagggagaaggggacccccaggcagaagggaggaggcaggacttgccctccagccttccagaacctgagacccaggctccaccaagaagctag

SEQ ID NO: 450 - DNA, 381 bp, Homo sapiens;
atggccgaggcaggggctgggctgagcgagaccgtcactgagacaacggttaccgtgacaaccgagcccgagaaccggagccttaccatcaaacttcggaaacggaagccagagaaaaaggtagaatggacaagtgacactgtggacaatgaacacatgggccgccgctcatccaaatgctgctgtatttatgagaaacctcgggcctttggcgagagctccacggaaagtgatgaggaggaagaagagggctgtggtcatacacactgtgtacgtggccaccgcaaaggacggcgtcgtgcaaccctaggaccgacccccaccacccctccccagcctcctgacccttcccagccccctccagggccaatgcagcactaa

SEQ ID NO: 451 - DNA, 618 bp, Homo sapiens;
atggcggcctcgacggcctcgcaccggcccatcaaggggatcttgaagaacaagacctctacgacttcctctatggtggcgtcggccgaacagccccgcgggaatgtcgacgaggagctgagcaaaaaatcccagaagtgggatgaaatgaacatcttggcgacgtatcatccagcagacaaagactatggtttaatgaaaatagatgaaccaagcactccttaccatagtatgatgggggatgatgaagatgcctgtagtgacaccgaggccactgaagccatggcgccagacatcttagccaggaaattagctgcagctgaaggcttggagccaaagtatcggattcaggaacaagaaagcagtggagaggaggatagtgacctctcacctgaagaacgagaaaaaaagcgacaatttgaaatgaaaaggaagcttcactacaatgaaggactcaatatcaaactagccagacaattaatttcaaaagacctacatgatgatgatgaagatgaagaaatgttagagactgcagatggagaaagcatgaatacggaagaatcaaatcaaggatctactccaagtgaccaacagcaaaacaaattacgaagttcatag

SEQ ID NO: 452 - DNA, 1461 bp, Homo sapiens;
atgtcgtcgtcgtcgccgccggcgggggctgccagcgccgccatctcggcctcggagaaagtggacggcttcacccggaaatcggtccgcaaggcgcagaggcagaagcgctcccagggctcgtcgcagtttcgcagccagggcagccaggcagagctgcacccgctgccccagctcaaagatgccacttcaaatgaacaacaagagcttttctgtcagaagttgcagcagtgttgtatactgtttgatttcatggactctgtttcagacttgaagagcaaagaaattaaaagagcaacactgaatgaactggttgagtatgtttcaactaatcgtggtgtaattgttgaatcagcgtattctgatatagtaaaaatgatcagtgctaacatcttccgtacacttcctccaagtgataatccagattttgatccagaagaggatgaacccacgcttgaggcctcttggcctcacatacagttggtatatgaattcttcttgagatttttggagagccctgatttccagcctagcattgcaaaacgatacattgatcagaaattcgtacaacagctcctggagctttttgatagtgaagatcccagagaacgtgacttcctgaagactgttctgcaccgaatttatgggaaatttcttggattaagagcattcatcagaaaacaaattaacaacattttcctcaggtttatatatgaaacagaacatttcaatggtgttgctgaacttcttgaaatattaggaagtattatcaatggctttgcattgccactgaaagcagaacataaacaatttctaatgaaggttcttattcctatgcatactgcaaaaggattagctttgtttcatgctcagctagcatattgtgttgtacagttcctggagaaagatacaacactaacagagccagtgatcagaggactgctgaaattttggccaaaaacctgcagtcagaaagaggtgatgtttttaggagaaattgaagaaatcttagatgtcattgaaccaacacagttcaaaaaaattgaagagccacttttcaagcagatatccaagtgtgtatccagttctcattttcaggttgcagaaagggcattgtacttctggaataacgaatatattcttagtttgattgaggagaacattgataaaattctgccaattatgtttgccagtttgtacaaaatttccaaagaacactggaatccgaccattgtagcactggtatacaatgtgctgaaaaccctaatggaaatgaatggcaagcttttcgatgaccttactagctcatacaaagctgaaagacagagagagaaaaagaaggaattggaacgtgaagaattatggaaaaaattagaggagctaaagctaaagaaagctctagaaaaacagaatagtgcttacaacatgcacagtattctcagcaatacaagtgccgaataa

SEQ ID NO: 453 - DNA, 513 bp, Homo sapiens;
atgggaaatgaggcaagttatcctttggaaatgtgctcacactttgatgcggatgaaattaaaaggctaggaaagagatttaagaagcttgatttggacaattctggttctttgagtgtggaagagttcatgtctctgcctgagttacaacagaatcctttagtacagcgagtaatagatatattcgacacagatgggaatggagaagtagactttaaagaattcattgagggcgtctctcagttcagtgtcaaaggagataaggagcagaaattgaggtttgctttccgtatctatgacatggataaagatggctatatttccaatggggaactcttccaggtattgaagatgatggtggggaacaatctgaaagatacacagttacagcaaattgtagacaaaaccataataaatgcagataaggatggagatggaagaatatcctttgaagaattctgtgctgttgtaggtggcctagatatccacaaaaagatggtggtagatgtgtga

SEQ ID NO: 454 - DNA, 2802 bp, Homo sapiens;
atggcggacctctcgctgcttcaggaggacctgcaggaggacgcagacggatccctggactttgtctcacaagatgaaatgttgacgcccctggggagattggacaagtatgctgcaagtgagaacatatttaacagacaaatggtggcccggagtttgctcgataccttgagggaagtctgcgatgatgaaagagattgtattgctgttttggaaagaattagcagattggccgatgattcagaaccaactgtgagagcggagctgatggaacaggtgcctcacatcgcactgttttgtcaagaaaaccggccttcaataccatatgctttttcaaaattcttactacctattgtggttagataccttgcagatcagaataatcaggtgaggaaaacaagtcaggcagctttgctggctctgttggagcaggagctcattgaacgatttgatgtggagaccaaagtgtgccctgtcctcatagagctgacagccccagatagcaatgatgatgtgaaaacagaagctgtggctataatgtgcaaaatggctcccatggttgggaaggatattacagagcgtcttatcctccctaggttttgtgagatgtgctgcgattgcagaatgtttcacgttcgaaaggtctgtgctgccaattttggagatatttgcagtgtagttggccagcaagctactgaagaaatgttgctgcccagatttttccagctttgttctgataatgtatggggagtccgaaaggcttgtgctgaatgcttcatggcggtttcatgtgcaacatgtcaagaaatccgacggaccaaattatcagcactttttattaatttgatcagtgatccttcacgttgggttcgccaagcagcttttcagtctctgggacctttcatatctacttttgctaatccatctagctcaggccagtattttaaagaagaaagcaaaagttcagaagagatgtcagtagaaaacaaaaataggaccagagatcaagaagccccagaggatgtacaagtcaggccagaggatactccttcagatctcagtgttagtaattccagtgtcatactggaaaacacgatggaagaccatgctgctgaggcatccgggaagcctctaggtgaaattagtgttccactggacagctctttactttgtactttgtcctcagaatctcaccaggaagcagctagtaatgagaatgataaaaaacctggtaactacaaatctatgttacgaccagaggttggcaccacttcacaagattcagctctcttagatcaggaattgtataactccttccatttctggaggactcctcttcctgaaatagatctagacatagagcttgaacagaactctgggggaaaacccagcccagagggaccagaggaagaatctgagggccctgtgcccagttctccaaacatcaccatggccaccagaaaggaactggaagaaatgatagaaaatctagagccccacattgatgatccagatgttaaagcacaagtggaagtgctgtccgctgcactacgtgcttccagcctggatgcacatgaagagaccatcagtatagaaaagagaagtgatttgcaagatgaactggatataaatgagctaccaaattgtaaaataaatcaagaagattctgtgcctttaatcagcgatgctgttgagaatatggactccactcttcactatattcacagcgattcagacttgagcaacaatagcagttttagccctgatgaggaaaggagaactaaagtacaagatgttgtacctcaggcgttgttagatcagtatttatctatgactgacccttctcgtgcacagacggttgacactgaaattgctaagcactgtgcatatagcctccctggtgtggccttgacactcggaagacagaattggcactgcctgagagagacgtatgagactctggcctcagacatgcagtggaaagttcgacgaactctagcattctccatccacgagcttgcagttattcttggagatcaattgacagctgcagatctggttccaatttttaatggatttttaaaagacctcgatgaagtcaggataggtgttcttaaacacttgcatgattttctgaagcttcttcatattgacaaaagaagagaatatctttatcaacttcaggagtttttggtgacagataatagtagaaattggcggtttcgagctgaactggctgaacagctgattttacttctagagttatatagtcccagagatgtttatgactatttacgtcccattgctctgaatctgtgtgcagacaaagtttcttctgttcgttggatttcctacaagttggtcagcgagatggtgaagaagctgcacgcggcaacaccaccaacgttcggagtggacctcatcaatgagcttgtggagaactttggcagatgtcccaagtggtctggtcggcaagcctttgtctttgtctgccagactgtcattgaggatgactgccttcccatggaccagtttgctgtgcatctcatgccgcatctgctaaccttagcaaatgacagggttcctaacgtgcgagtgctgcttgcaaagacattaagacaaactctactagaaaaagactatttcttggcctctgccagctgccaccaggaggctgtggagcagaccatcatggctcttcagatggaccgtgacagcgatgtcaagtattttgcaagcatccaccctgccagtaccaaaatctccgaagatgccatgagcacagcgtcctcaacctactag

SEQ ID NO: 455 - DNA, 1680 bp, Homo sapiens;
atgcgcagactcagttcctggagaaagatggcgacagccgagaagcagaaacacgacgggcgggtgaagatcggccactacattctgggtgacacgctgggggtcggcaccttcggcaaagtgaaggttggcaaacatgaattgactgggcataaagtagctgtgaagatactcaatcgacagaagattcggagccttgatgtggtaggaaaaatccgcagagaaattcagaacctcaagcttttcaggcatcctcatataattaaactgtaccaggtcatcagtacaccatctgatattttcatggtgatggaatatgtctcaggaggagagctatttgattatatctgtaagaatggaaggctggatgaaaaagaaagtcggcgtctgttccaacagatcctttctggtgtggattattgtcacaggcatatggtggtccatagagatttgaaacctgaaaatgtcctgcttgatgcacacatgaatgcaaagatagctgattttggtctttcaaacatgatgtcagatggtgaatttttaagaacaagttgtggctcacccaactatgctgcaccagaagtaatttcaggaagattgtatgcaggcccagaggtagatatatggagcagtggggttattctctatgctttattatgtggaacccttccatttgatgatgaccatgtgccaactctttttaagaagatatgtgatgggatcttctatacccctcaatatttaaatccttctgtgattagccttttgaaacatatgctgcaggtggatcccatgaagagggccacaatcaaagatatcagggaacatgaatggtttaaacaggaccttccaaaatatctctttcctgaggatccatcatatagttcaaccatgattgatgatgaagccttaaaagaagtatgtgaaaagtttgagtgctcagaagaggaagttctcagctgtctttacaacagaaatcaccaggatcctttggcagttgcctaccatctcataatagataacaggagaataatgaatgaagccaaagatttctatttggcgacaagcccacctgattcttttcttgatgatcatcacctgactcggccccatcctgaaagagtaccattcttggttgctgaaacaccaagggcacgccatacccttgatgaattaaatccacagaaatccaaacaccaaggtgtaaggaaagcaaaatggcatttaggaattagaagtcaaagtcgaccaaatgatattatggcagaagtatgtagagcaatcaaacaattggattatgaatggaaggttgtaaacccatattatttgcgtgtacgaaggaagaatcctgtgacaagcacttactccaaaatgagtctacagttataccaagtggatagtagaacttatctactggatttccgtagtattgatgatgaaattacagaagccaaatcagggactgctactccacagagatcgggatcagttagcaactatcgatcttgccaaaggagtgattcagatgctgaggctcaaggaaaatcctcagaagtttctcttacctcatctgtgacctcacttgactcttctcctgttgacctaactccaagacctggaagtcacacaatagaattttttgagatgtgtgcaaatctaattaaaattcttgcacaataa

SEQ ID NO: 456 - DNA, 1710 bp, Homo sapiens;
atgggaagcgcggttatggacaccaagaagaaaaaagatgtttccagccccggcgggagcggcggcaagaaaaatgccagccagaagaggcgttcgctgcgcgtgcacattccggacctgagctccttcgccatgccgctcctggacggagacctggagggttccggaaagcattcctctcgaaaggtggacagccccttcggcccgggcagcccctccaaagggttcttctccagaggcccccagccccggccctccagccccatgtctgcacctgtgaggcccaagaccagccccggctctcccaaaaccgtgttcccgttctcctaccaggagtccccgccacgctcccctcgacgcatgagcttcagtgggatcttccgctcctcctccaaagagtcttcccccaactccaaccctgctacctcgcccgggggcatcaggtttttctcccgctccagaaaaacctccggcctctcctcctctccgtcaacacccacccaagtgaccaagcagcacacgtttcccctggaatcctataagcacgagcctgaacggttagagaatcgcatctatgcctcgtcttcccccccggacacagggcagaggttctgcccgtcttccttccagagcccgaccaggcctccactggcatcaccgacacactatgctccctccaaagccgcggcgctggcggcggccctgggacccgcggaagccggcatgctggagaagctggagttcgaggacgaagcagtagaagactcagaaagtggtgtttacatgcgattcatgaggtcacacaagtgttatgacatcgttccaaccagttcaaagcttgttgtctttgatactacattacaagttaaaaaggccttctttgctttggtagccaacggtgtccgagcagcgccactgtgggagagtaaaaaacaaagttttgtaggaatgctaacaattacagatttcataaatatactacatagatactataaatcacctatggtacagatttatgaattagaggaacataaaattgaaacatggagggagctttatttacaagaaacatttaagcctttagtgaatatatctccagatgcaagcctcttcgatgctgtatactccttgatcaaaaataaaatccacagattgcccgttattgaccctatcagtgggaatgcactttatatacttacccacaaaagaatcctcaagttcctccagctttttatgtctgatatgccaaagcctgccttcatgaagcagaacctggatgagcttggaataggaacgtaccacaacattgccttcatacatccagacactcccatcatcaaagccttgaacatatttgtggaaagacgaatatcagctctgcctgttgtggatgagtcaggaaaagttgtagatatttattccaaatttgatgtaattaatcttgctgctgagaaaacatacaataacctagatatcacggtgacccaggcccttcagcaccgttcacagtattttgaaggtgttgtgaagtgcaataagctggaaatactggagaccatcgtggacagaatagtaagagctgaggtccatcggctggtggtggtaaatgaagcagatagtattgtgggtattatttccctgtcggacattctgcaagccctgatcctcacaccagcaggtgccaaacaaaaggagacagaaacggagtga

SEQ ID NO: 457 - DNA, 2031 bp, Homo sapiens;
atggcgccgttcctgcgcatcgccttcaactcctatgagctgggctccctgcaggccgaggacgaggcgaaccagcccttctgtgccgtgaagatgaaggaggcgctcagcacagagcgtgggaaaacactggtgcagaagaagccgaccatgtatcctgagtggaagtcgacgttcgatgcccacatctatgaggggcgcgtcatccagattgtgctaatgcgggcagcagaggagccagtgtctgaggtgaccgtgggtgtgtcggtgctggccgagcgctgcaagaagaacaatggcaaggctgagttctggctggacctgcagcctcaggccaaggtgttgatgtctgttcagtatttcctggaggacgtggattgcaaacagtctatgcgcagtgaggacgaggccaagttcccaacgatgaaccgccgcggagccatcaaacaggccaaaatccactacatcaagaaccatgagtttatcgccaccttctttgggcaacccaccttctgttctgtgtgcaaagactttgtctggggcctcaacaagcaaggctacaaatgcaggcaatgtaacgctgccatccacaagaaatgcatcgacaagatcatcggcagatgcactggcaccgcggccaacagccgggacactatattccagaaagaacgcttcaacatcgacatgccgcaccgcttcaaggttcacaactacatgagccccaccttctgtgaccactgcggcagcctgctctggggactggtgaagcagggattaaagtgtgaagactgcggcatgaatgtgcaccataaatgccgggagaaggtggccaacctctgcggcatcaaccagaagcttttggctgaggccttgaaccaagtcacccagagagcctcccggagatcagactcagcctcctcagagcctgttgggatatatcagggtttcgagaagaagaccggagttgctggggaggacatgcaagacaacagtgggacctacggcaagatctgggagggcagcagcaagtgcaacatcaacaacttcatcttccacaaggtcctgggcaaaggcagcttcgggaaggtgctgcttggagagctgaagggcagaggagagtactttgccatcaaggccctcaagaaggatgtggtcctgatcgacgacgacgtggagtgcaccatggttgagaagcgggtgctgacacttgccgcagagaatccctttctcacccacctcatctgcaccttccagaccaaggaccacctgttctttgtgatggagttcctcaacgggggggacctgatgtaccacatccaggacaaaggccgctttgaactctaccgtgccacgttttatgccgctgagataatgtgtggactgcagtttctacacagcaagggcatcatttacagggacctcaaactggacaatgtgctgctggaccgggatggccacatcaagattgccgactttgggatgtgcaaagagaacatattcggggagagccgggccagcaccttctgcggcacccctgactatatcgcccctgagatcctacagggcctgaagtacacattctctgtggactggtggtctttcggggtccttctgtacgagatgctcattggccagtcccccttccatggtgatgatgaggatgaactcttcgagtccatccgtgtggacacgccacattatccccgctggatcaccaaggagtccaaggacatcctggagaagctctttgaaagggaaccaaccaagaggctgggagtgaccggaaacatcaaaatccaccccttcttcaagaccataaactggactctgctggaaaagcggaggttggagccacctttcaggcccaaagtgaagtcacccagagactacagtaactttgaccaggagttcctgaacgagaaggcgcgcctctcctacagcgacaagaacctcatcgactccatggaccagtctgcattcgctggcttctcctttgtgaaccccaaattcgagcacctcctggaagattga

SEQ ID NO: 458 - DNA, 1302 bp, Homo sapiens;
atggcaacatcaggtgactgtcccagaagtgaatcgcagggagaagagcctgctgagtgcagtgaggccggtctcctgcaggagggagtacagccagaggagtttgtggccatcgcggactacgctgccaccgatgagacccagctcagttttttgagaggagaaaaaattcttatcctgagacaaaccactgcagattggtggtggggtgagcgtgcgggctgctgtgggtacattccggcaaaccatgtggggaagcacgtggatgagtacgaccccgaggacacgtggcaggatgaagagtacttcggcagctatggaactctgaaactccacttggagatgttggcagaccagccacgaacaactaaataccacagtgtcatcctgcagaataaagaatccctgacggataaagtcatcctggacgtgggctgtgggactgggatcatcagtctcttctgtgcacactatgcgcggcctagagcggtgtacgcggtggaggccagtgagatggcacagcacacggggcagctggtcctgcagaacggctttgctgacatcatcaccgtgtaccagcagaaggtggaggatgtggtgctgcccgagaaggtggacgtgctggtgtctgagtggatggggacctgcctgctgtttgagttcatgatcgagtccatcctgtatgcccgggatgcctggctgaaggaggacggggtcatttggcccaccatggctgcgttgcaccttgtgccctgcagtgctgataaggattatcgtagcaaggtgctcttctgggacaacgcgtacgagttcaacctcagcgctctgaaatctttagcagttaaggagtttttttcaaagcccaagtataaccacattttgaaaccagaagactgtctctctgaaccgtgcactatattgcagttggacatgagaaccgtgcaaatttctgatctagagaccctgaggggcgagctgcgcttcgacatcaggaaggcggggaccctgcacggcttcacggcctggtttagcgtccacttccagagcctgcaggaggggcagccgccgcaggtgctcagcaccgggcccttccaccccaccacacactggaagcagacgctgttcatgatggacgacccagtccctgtccatacaggagacgtggtcacgggttcagttgtgttgcagagaaacccagtgtggagaaggcacatgtctgtggctctgagctgggctgtcacttccagacaagaccccacatctcaaaaagttggagaaaaagtcttccccatctggagatga

SEQ ID NO: 459 - DNA, 1362 bp, Homo sapiens;
atggaggactacctgcagggttgtcgagctgctctgcaggagtcccgacctctacatgttgtgctgggaaatgaagcctgtgatttggactccacagtgtctgctcttgccctggctttttacctagcaaagacaactgaggctgaggaagtctttgtgccagttttaaatataaaacgttctgaactacctctgcgaggtgacattgtcttctttcttcagaaggttcatattccagagagtatcttgatttttcgggatgagattgacctccatgcattataccaggctggccaactcaccctcatccttgtcgaccatcatatcttatccaaaagtgacacagccctagaggaggcagtagcagaggtgctagaccatcgacccatcgagccgaaacactgccctccctgccatgtttcagttgagctggtggggtcctgtgctaccctggtgaccgagagaatcctgcagggggcaccagagatcttggacaggcaaactgcagcccttctgcatggaaccatcatcctggactgtgtcaacatggaccttaaaattggaaaggcaaccccaaaggacagcaaatatgtggagaaactagaggcccttttcccagacctacccaagagaaatgatatatttgattccctacaaaaggcaaagtttgatgtatcaggactgaccactgagcagatgctgagaaaagaccagaagactatctatagacaaggcgtcaaggtggccattagtgcaatatatatggatttggaggcctttctgcagaggtctaacctccttgcagatctccatgctttctgccaggctcacagctatgatgtcctggttgccatgactatctttttcaacactcacaatgagccagtgcggcagttggctattttctgtccccatgtggcactccaaacaacgatctgtgaagtcctggaacgctcccactctccacccctgaagctgacccctgcctcaagtacccaccctaacctccatgcctatcttcaaggcaacacccaggtctctcgaaagaaacttctgcccctgctccaggaagccctgtcagcatattttgactccatgaagatcccttcaggacagcctgagacagcagatgtgtccagggagcaagtggacaaggaattggacagggcaagtaactccctgatttctggcctgagtcaagatgaggaggaccctccgctgcccccgacgcccatgaacagcttggtggatgagtgccctctagatcaggggctgcctaaactctctgctgaggccgtcttcgagaagtgcagtcagatctcactgtcacagtctaccacagcctccctgtccaagaagtga

SEQ ID NO: 460 - DNA, 1575 bp, Homo sapiens;
atgtacgccctcttcctcctggccagcctcctgggcgcggctctagccggcccggtccttggactgaaagaatgcaccaggggctcggcagtgtggtgccagaatgtgaagacggcgtccgactgcggggcagtgaagcactgcctgcagaccgtttggaacaagccaacagtgaaatcccttccctgcgacatatgcaaagacgttgtcaccgcagctggtgatatgctgaaggacaatgccactgaggaggagatccttgtttacttggagaagacctgtgactggcttccgaaaccgaacatgtctgcttcatgcaaggagatagtggactcctacctccctgtcatcctggacatcattaaaggagaaatgagccgtcctggggaggtgtgctctgctctcaacctctgcgagtctctccagaagcacctagcagagctgaatcaccagaagcagctggagtccaataagatcccagagctggacatgactgaggtggtggcccccttcatggccaacatccctctcctcctctaccctcaggacggcccccgcagcaagccccagccaaaggataatggggacgtttgccaggactgcattcagatggtgactgacatccagactgctgtacggaccaactccacctttgtccaggccttggtggaacatgtcaaggaggagtgtgaccgcctgggccctggcatggccgacatatgcaagaactatatcagccagtattctgaaattgctatccagatgatgatgcacatgcaacccaaggagatctgtgcgctggttgggttctgtgatgaggtgaaagagatgcccatgcagactctggtccccgccaaagtggcctccaagaatgtcatccctgccctggaactggtggagcccattaagaagcacgaggtcccagcaaagtctgatgtttactgtgaggtgtgtgaattcctggtgaaggaggtgaccaagctgattgacaacaacaagactgagaaagaaatactcgacgcttttgacaaaatgtgctcgaagctgccgaagtccctgtcggaagagtgccaggaggtggtggacacgtacggcagctccatcctgtccatcctgctggaggaggtcagccctgagctggtgtgcagcatgctgcacctctgctctggcacgcggctgcctgcactgaccgttcacgtgactcagccaaaggacggtggcttctgcgaagtgtgcaagaagctggtgggttatttggatcgcaacctggagaaaaacagcaccaagcaggagatcctggctgctcttgagaaaggctgcagcttcctgccagacccttaccagaagcagtgtgatcagtttgtggcagagtacgagcccgtgctgatcgagatcctggtggaggtgatggatccttccttcgtgtgcttgaaaattggagcctgcccctcggcccataagcccttgttgggaactgagaagtgtatatggggcccaagctactggtgccagaacacagagacagcagcccagtgcaatgctgtcgagcattgcaaacgccatgtgtggaactag

SEQ ID NO: 461 - DNA, 1404 bp, Homo sapiens;
atgacagagttacctgcaccgttgtcctacttccagaatgcacagatgtctgaggacaaccacctgagcaatactgtacgtagccagaatgacaatagagaacggcaggagcacaacgacagacggagccttggccaccctgagccattatctaatggacgaccccagggtaactcccggcaggtggtggagcaagatgaggaagaagatgaggagctgacattgaaatatggcgccaagcatgtgatcatgctctttgtccctgtgactctctgcatggtggtggtcgtggctaccattaagtcagtcagcttttatacccggaaggatgggcagctaatctataccccattcacagaagataccgagactgtgggccagagagccctgcactcaattctgaatgctgccatcatgatcagtgtcattgttgtcatgactatcctcctggtggttctgtataaatacaggtgctataaggtcatccatgcctggcttattatatcatctctattgttgctgttctttttttcattcatttacttgggggaagtgtttaaaacctataacgttgctgtggactacattactgttgcactcctgatctggaattttggtgtggtgggaatgatttccattcactggaaaggtccacttcgactccagcaggcatatctcattatgattagtgccctcatggccctggtgtttatcaagtacctccctgaatggactgcgtggctcatcttggctgtgatttcagtatatgatttagtggctgttttgtgtccgaaaggtccacttcgtatgctggttgaaacagctcaggagagaaatgaaacgctttttccagctctcatttactcctcaacaatggtgtggttggtgaatatggcagaaggagacccggaagctcaaaggagagtatccaaaaattccaagtataatgcagaaagcacagaaagggagtcacaagacactgttgcagagaatgatgatggcgggttcagtgaggaatgggaagcccagagggacagtcatctagggcctcatcgctctacacctgagtcacgagctgctgtccaggaactttccagcagtatcctcgctggtgaagacccagaggaaaggggagtaaaacttggattgggagatttcattttctacagtgttctggttggtaaagcctcagcaacagccagtggagactggaacacaaccatagcctgtttcgtagccatattaattggtttgtgccttacattattactccttgccattttcaagaaagcattgccagctcttccaatctccatcacctttgggcttgttttctactttgccacagattatcttgtacagccttttatggaccaattagcattccatcaattttatatctag

SEQ ID NO: 462 - DNA, 1251 bp, Homo sapiens;
atgatgccccagctgcagttcaaagatgccttttggtgcagggacttcacagcccacacgggctacgaggtgctgctgcagcggcttctggatggcaggaagatgtgcaaagacatggaggagctactgaggcagagggcccaggcggaggagcggtacgggaaggagctggtgcagatcgcacggaaggcaggtggccagacggagatcaactccctgagggcctcctttgactccttgaagcagcaaatggagaatgtgggcagctcacacatccagctggccctgaccctgcgtgaggagctgcggagtctcgaggagtttcgtgagaggcagaaggagcagaggaagaagtatgaggccgtcatggaccgggtccagaagagcaagctgtcgctctacaagaaggccatggagtccaagaagacatacgagcagaagtgccgggacgcggacgacgcggagcaggccttcgagcgcattagcgccaacggccaccagaagcaggtggagaagagtcagaacaaagccaggcagtgcaaggactcggccaccgaggcagagcgggtatacaggcagagcattgcgcagctggagaaggtccgggctgagtgggagcaggagcaccggaccacctgtgaggcctttcagctgcaagagtttgaccggctgaccattctccgcaacgccctgtgggtgcacagcaaccagctctccatgcagtgtgtcaaggatgatgagctctacgaggaagtgcggctgacgctggaaggctgcagcatagacgccgacatcgacagtttcatccaggccaagagcacgggcacagagccccccgctccggtgccctaccagaactattacgatcgggaggtcaccccgctgaccagcagccctggcatacagccgtcctgcggcatgataaagaggttctctggactgctgcacggaagtcccaagaccacttcgttggcagcttctgctgcgtccacagagaccctgacccccacccccgagcggaatgagggtgtctacacagccatcgcagtgcaggagatacagggaaacccggcctcaccagcccaggagtaccgggcgctctacgattatacagcgcagaacccagatgagctggacctgtccgcgggagacatcctggaggtgatcctggaaggggaggatggctggtggactgtggagaggaacgggcagcgtggcttcgtccctggttcctacctggagaagctttga

SEQ ID NO: 463 - DNA, 1029 bp, Homo sapiens;
atggagccacatgactcctcccacatggactctgagttccgatacactctcttcccgattgtttacagcatcatctttgtgctcggggtcattgctaatggctacgtgctgtgggtctttgcccgcctgtacccttgcaagaaattcaatgagataaagatcttcatggtgaacctcaccatggcggacatgctcttcttgatcaccctgccactttggattgtctactaccaaaaccagggcaactggatactccccaaattcctgtgcaacgtggctggctgccttttcttcatcaacacctactgctctgtggccttcctgggcgtcatcacttataaccgcttccaggcagtaactcggcccatcaagactgctcaggccaacacccgcaagcgtggcatctctttgtccttggtcatctgggtggccattgtgggagctgcatcctacttcctcatcctggactccaccaacacagtgcccgacagtgctggctcaggcaacgtcactcgctgctttgagcattacgagaagggcagcgtgccagtcctcatcatccacatcttcatcgtgttcagcttcttcctggtcttcctcatcatcctcttctgcaacctggtcatcatccgtaccttgctcatgcagccggtgcagcagcagcgcaacgctgaagtcaagcgccgggcgctgtggatggtgtgcacggtcttggcggtgttcatcatctgcttcgtgccccaccacgtggtgcagctgccctggacccttgctgagctgggcttccaggacagcaaattccaccaggccattaatgatgcacatcaggtcaccctctgcctccttagcaccaactgtgtcttagaccctgttatctactgtttcctcaccaagaagttccgcaagcacctcaccgaaaagttctacagcatgcgcagtagccggaaatgctcccgggccaccacggatacggtcactgaagtggttgtgccattcaaccagatccctggcaattccctcaaaaattag

SEQ ID NO: 464 - DNA, 1212 bp, Homo sapiens;
atgacagccatcatcaaagagatcgttagcagaaacaaaaggagatatcaagaggatggattcgacttagacttgacctatatttatccaaacattattgctatgggatttcctgcagaaagacttgaaggcgtatacaggaacaatattgatgatgtagtaaggtttttggattcaaagcataaaaaccattacaagatatacaatctttgtgctgaaagacattatgacaccgccaaatttaattgcagagttgcacaatatccttttgaagaccataacccaccacagctagaacttatcaaacccttttgtgaagatcttgaccaatggctaagtgaagatgacaatcatgttgcagcaattcactgtaaagctggaaagggacgaactggtgtaatgatatgtgcatatttattacatcggggcaaatttttaaaggcacaagaggccctagatttctatggggaagtaaggaccagagacaaaaagggagtaactattcccagtcagaggcgctatgtgtattattatagctacctgttaaagaatcatctggattatagaccagtggcactgttgtttcacaagatgatgtttgaaactattccaatgttcagtggcggaacttgcaatcctcagtttgtggtctgccagctaaaggtgaagatatattcctccaattcaggacccacacgacgggaagacaagttcatgtactttgagttccctcagccgttacctgtgtgtggtgatatcaaagtagagttcttccacaaacagaacaagatgctaaaaaaggacaaaatgtttcacttttgggtaaatacattcttcataccaggaccagaggaaacctcagaaaaagtagaaaatggaagtctatgtgatcaagaaatcgatagcatttgcagtatagagcgtgcagataatgacaaggaatatctagtacttactttaacaaaaaatgatcttgacaaagcaaataaagacaaagccaaccgatacttttctccaaattttaaggtgaagctgtacttcacaaaaacagtagaggagccgtcaaatccagaggctagcagttcaacttctgtaacaccagatgttagtgacaatgaacctgatcattatagatattctgacaccactgactctgatccagagaatgaaccttttgatgaagatcagcatacacaaattacaaaagtctga

SEQ ID NO: 465 - DNA, 1467 bp, Homo sapiens;
atgtccactcccggggtcaattcgtccgcctccttgagccccgaccggctgaacagcccagtgaccatcccggcggtgatgttcatcttcggggtggtgggcaacctggtggccatcgtggtgctgtgcaagtcgcgcaaggagcagaaggagacgaccttctacacgctggtatgtgggctggctgtcaccgacctgttgggcactttgttggtgagcccggtgaccatcgccacgtacatgaagggccaatggcccgggggccagccgctgtgcgagtacagcaccttcattctgctcttcttcagcctgtccggcctcagcatcatctgcgccatgagtgtcgagcgctacctggccatcaaccatgcctatttctacagccactacgtggacaagcgattggcgggcctcacgctctttgcagtctatgcgtccaacgtgctcttttgcgcgctgcccaacatgggtctcggtagctcgcggctgcagtacccagacacctggtgcttcatcgactggaccaccaacgtgacggcgcacgccgcctactcctacatgtacgcgggcttcagctccttcctcattctcgccaccgtcctctgcaacgtgcttgtgtgcggcgcgctgctccgcatgcaccgccagttcatgcgccgcacctcgctgggcaccgagcagcaccacgcggccgcggccgcctcggttgcctcccggggccaccccgctgcctccccagccttgccgcgcctcagcgactttcggcgccgccggagcttccgccgcatcgcgggcgccgagatccagatggtcatcttactcattgccacctccctggtggtgctcatctgctccatcccgctcgtggtgcgagtattcgtcaaccagttatatcagccaagtttggagcgagaagtcagtaaaaatccagatttgcaggccatccgaattgcttctgtgaaccccatcctagacccctggatatatatcctcctgagaaagacagtgctcagtaaagcaatagagaagatcaaatgcctcttctgccgcattggcgggtcccgcagggagcgctccggacagcactgctcagacagtcaaaggacatcttctgccatgtcaggccactctcgctccttcatctcccgggagctgaaggagatcagcagtacatctcagaccctcctgccagacctctcactgccagacctcagtgaaaatggccttggaggcaggaatttgcttccaggtgtgcctggcatgggcctggcccaggaagacaccacctcactgaggactttgcgaatatcagagacctcagactcttcacagggtcaggactcagagagtgtcttactggtggatgaggctggtgggagcggcagggctgggcctgcccctaaggggagctccctgcaagtcacatttcccagtgaaacactgaacttatcagaaaaatgtatataa

SEQ ID NO: 466 - DNA, 1788 bp, Homo sapiens;
atggtgaggtggtttcaccgagacctcagtgggctggatgcagagaccctgctcaagggccgaggtgtccacggtagcttcctggctcggcccagtcgcaagaaccagggtgacttctcgctctccgtcagggtgggggatcaggtgacccatattcggatccagaactcaggggatttctatgacctgtatggaggggagaagtttgcgactctgacagagctggtggagtactacactcagcagcagggtgtcctgcaggaccgcgacggcaccatcatccacctcaagtacccgctgaactgctccgatcccactagtgagaggtggtaccatggccacatgtctggcgggcaggcagagacgctgctgcaggccaagggcgagccctggacgtttcttgtgcgtgagagcctcagccagcctggagacttcgtgctttctgtgctcagtgaccagcccaaggctggcccaggctccccgctcagggtcacccacatcaaggtcatgtgcgagggtggacgctacacagtgggtggtttggagaccttcgacagcctcacggacctggtggagcatttcaagaagacggggattgaggaggcctcaggcgcctttgtctacctgcggcagccgtactatgccacgagggtgaatgcggctgacattgagaaccgagtgttggaactgaacaagaagcaggagtccgaggatacagccaaggctggcttctgggaggagtttgagagtttgcagaagcaggaggtgaagaacttgcaccagcgtctggaagggcagcggccagagaacaagggcaagaaccgctacaagaacattctcccctttgaccacagccgagtgatcctgcagggacgggacagtaacatccccgggtccgactacatcaatgccaactacatcaagaaccagctgctaggccctgatgagaacgctaagacctacatcgccagccagggttgtctggaggccacggtcaatgacttctggcagatggcgtggcaggagaacagccgtgtcatcgtcatgaccacccgagaggtggagaaaggccggaacaaatgcgtcccatactggcccgaggtgggcatgcagcgtgcttatgggccctactctgtgaccaactgcggggagcatgacacaaccgaatacaaactccgtaccttacaggtctccccgctggacaatggagacctgattcgggagatctggcattaccagtacctgagctggcccgaccatggggtccccagtgagcctgggggtgtcctcagcttcctggaccagatcaaccagcggcaggaaagtctgcctcacgcagggcccatcatcgtgcactgcagcgccggcatcggccgcacaggcaccatcattgtcatcgacatgctcatggagaacatctccaccaagggcctggactgtgacattgacatccagaagaccatccagatggtgcgggcgcagcgctcgggcatggtgcagacggaggcgcagtacaagttcatctacgtggccatcgcccagttcattgaaaccactaagaagaagctggaggtcctgcagtcgcagaagggccaggagtcggagtacgggaacatcacctatcccccagccatgaagaatgcccatgccaaggcctcccgcacctcgtccaaacacaaggaggatgtgtatgagaacctgcacactaagaacaagagggaggagaaagtgaagaagcagcggtcagcagacaaggagaagagcaagggttccctcaagaggaagtga

SEQ ID NO: 467 - DNA, 2103 bp, Homo sapiens;
atggagcccttgtgtccactcctgctggtgggttttagcttgccgctcgccagggctctcaggggcaacgagaccactgccgacagcaacgagacaaccacgacctcaggccctccggacccgggcgcctcccagccgctgctggcctggctgctactgccgctgctgctcctcctcctcgtgctccttctcgccgcctacttcttcaggttcaggaagcagaggaaagctgtggtcagcaccagcgacaagaagatgcccaacggaatcttggaggagcaagagcagcaaagggtgatgctgctcagcaggtcaccctcagggcccaagaagtattttcccatccccgtggagcacctggaggaggagatccgtatcagatccgccgacgactgcaagcagtttcgggaggagttcaactcattgccatctggacacatacaaggaacttttgaactggcaaataaagaagaaaacagagaaaaaaacagatatcccaacatccttcccaatgaccattctagggtgattctgagccaactggatggaattccctgttcagactacatcaatgcttcctacatagatggttacaaagagaagaataaattcatagcagctcaaggtcccaaacaggaaacggttaacgacttctggagaatggtctgggagcaaaagtctgcgaccatcgtcatgttaacaaacttgaaagaaaggaaagaggaaaagtgccatcagtactggcccgaccaaggctgctggacctatggaaacatccgggtgtgcgtggaggactgcgtggttttggtcgactacaccatccggaagttctgcatacagccacagctccccgacggctgcaaagcccccaggctggtctcacagctgcacttcaccagctggcccgacttcggagtgccttttacccccattgggatgctgaagttcctcaagaaagtaaagacgctcaaccccgtgcacgctgggcccatcgtggtccactgtagcgcgggcgtgggccggacgggcaccttcattgtgatcgatgccatgatggccatgatgcacgcggagcagaaggtggatgtgtttgaatttgtgtctcgaatccgtaatcagcgccctcagatggttcaaacggatatgcagtacacgttcatctaccaagccttactcgagtactacctctacggggacacagagctggacgtgtcctccctggagaagcacctgcagaccatgcacggcaccaccacccacttcgacaagatcgggctggaggaggagttcaggaaattgacaaatgtccggatcatgaaggagaacatgaggacgggcaacttgccggcaaacatgaagaaggccagggtcatccagatcatcccgtatgacttcaaccgagtgatcctttccatgaaaaggggtcaagaatacacagactacatcaacgcatccttcatagacggctaccgacagaaggactatttcatcgccacccaggggccactggcacacacggttgaggacttctggaggatgatctgggaatggaaatcccacactatcgtgatgctgacggaggtgcaggagagagagcaggataaatgctaccagtattggccaaccgagggctcagttactcatggagaaataacgattgagataaagaatgataccctttcagaagccatcagtatacgagactttctggtcactctcaatcagccccaggcccgccaggaggagcaggtccgagtagtgcgccagtttcacttccacggctggcctgagatcgggattcccgccgagggcaaaggcatgattgacctcatcgcagccgtgcagaagcagcagcagcagacaggcaaccaccccatcaccgtgcactgcagtgccggagctgggcgaacaggtacattcatagccctcagcaacattttggagcgagtaaaagccgagggacttttagatgtatttcaagctgtgaagagtttacgacttcagagaccacatatggtgcaaaccctggaacagtatgaattctgctacaaagtggtacaagattttattgatatattttctgattatgctaatttcaaatga

SEQ ID NO: 468 - DNA, 3195 bp, Homo sapiens;
atgaatcatgattttcaagctcttgcattagaatctcggggaatgggagagcttttgcctaccaaaaagttttgggaacctgatgattcaacaaaagatggacaaaaaggcatatttcttggggatgatgaatggagagagactgcatggggagcttctcaccattcaatgtcccagcctattatggtacagagaagatctggacagggttttcatggaaacagtgaagtaaatgcaatactgtctccgcgatcagaaagtggaggccttggtgtgagcatggtagaatatgtattaagttcttctcctgctgataaattggattctcgatttaggaagggaaattttggcactagagatgctgaaacagatggacctgagaaaggagatcaaaaaggcaaggcttctccatttgaggaggaccaaaacagagatcttaaacaaggagatgatgatgattctaaaataaatggcagaggtttgccaaatggaatggatgccgattgcaaagattttaatcgtactcctggaagtcgtcaagcctctccaactgaagtagttgagcgcttgggccccaatactaatccctcagaaggactggggcctcttcctaatcctacagctaataaaccacttgttgaagaattttcaaatcctgaaactcagaatctggatgccatggaacaagttggtctggaatccttacagtttgactatcctggtaatcaggtaccaatggactcttcaggagctactgtaggcctttttgactacaattcccagcagcagctctttcagaggactaatgcactaacagttcaacagttaactgcagctcaacagcagcaatatgcattagcagcagctcagcagccacatatagctggtgtattctcagcaggccttgctccagctgcatttgtgccaaatccatacattattagtgctgctcctccagggaccgatccgtatactgcagcaggattggctgcagcagctacattagcaggtccagcagtggttccacctcagtattacggcgttccatggggggtgtatccagccaacttatttcagcagcaagctgcagctgcggcaaataacacagccagtcagcaagcagcatcacaagctcagcctggacagcaacaggttctccgtgctggagcaggtcagcgtcctcttactcccaatcagggtcagcaagggcagcaagcagaatcacttgcggcagctgcagcagcaaatccaacattggcttttggtcagggtcttgctactggcatgccaggctatcaagtactagctccaactgcctattatgatcagactggtgccttagtggttggccctggagcaaggactggccttggagctccagttcggttaatggctccaacacctgttttaattagttcagcagcagcacaagctgcagcagcagcagcagctggaggaactgcaagtagccttacaggcagcacaaatggtctgtttcggccaattggcactcagccaccacagcagcagcaacagcagccaagcactaatctgcaatctaattcattttatggaagcagttctttgactaatagctcccagagtagttctttattttctcatggacctggtcaacctggaagtacatctcttggctttggaagtggtaactctttgggtgctgctataggctcagccctcagtggatttggttcatcagttggcagttctgcaagtagtagtgccacaaggagagagtctctatctactagctctgacttgtacaaaagatctagtagcagcctagcacccatagggcaaccattttacaatagtctgggattttcctcctctccaagtccaataggcatgcctctgccaagccaaactccaggacattcacttacgccaccgccatcactttcatcacatggatcctcatccagtttgcatttaggaggactgacaaatggtagtggtcgatatatctctgcagcacctggagcagaagcaaaatatcgaagtgcttcaagcacttccagtctatttagctccagcagccagctctttcctccttcccggcttcggtataataggtctgatattatgccttctggccgcagtagattattggaagatttcagaaacaaccgcttcccaaaccttcagcttagagacttgattggacatatagttgagttttctcaagaccagcatggttctagattcatacagcaaaaactagagagagctactccagctgagcgacagatggtatttaatgaaattctgcaagcagcctatcaattaatgactgatgtttttggcaactatgttatacagaagttttttgagtttgggagtctggatcaaaaattagccctggctactcgtattcgtggtcatgttctacccttagccttgcagatgtatggctgccgcgttattcagaaagcattagaatctatttcttctgaccagcagagtgaaatggtaaaggagctggatggtcatgtgctcaaatgtgtgaaagatcagaatggaaaccatgttgtacaaaaatgtatcgaatgtgttcagccacagtcactacagttcatcattgatgctttcaagggacaagtatttgtgctttcaactcatccttatggctgcagagtaattcagcgcatcctagagcattgcactgcagaacagaccttacctatcttagaagaactccaccaacatacagagcagttggtacaggatcagtatggcaattatgttattcagcatgtactggaacacggtcgacctgaagacaagagcaaaattgtttccgaaatcaggggaaaggttttagccctgagtcaacacaaatttgccagcaatgtagtagaaaagtgtgttactcatgcctcccgtgctgagagagctttactgattgacgaggtttgctgccagaatgatggtcctcacagtgccttatacaccatgatgaaggaccagtatgccaattacgtggttcaaaagatgattgatatggctgaacctgctcagagaaagataatcatgcacaagattcgacctcacattactactttgcgcaaatacacatacgggaagcatatactggccaagttggaaaagtattatttgaagaatagcccggacctaggacctattggaggaccaccaaatggaatgctgtaa

SEQ ID NO: 469 - DNA, 2931 bp, Homo sapiens;
atgtctaacagtaacactactcaagagaccctggaaataatgaaagaatcagaaaaaaaactggtggaagaatctgtaaacaaaaacaagtttatatctaagactccaagtaaggaagaaattgagaaagaatgtgaagataccagtttgcgtcaggagacacagaggcggacatctaaccatggtcatgccaggaaaagagccaagtctaattccaagctaaagttggtgcgtagcctggcagtgtgtgaggagtcctccaccccatttgctgatgggccattagaaacccaggatataattcaattgcacatcagttgcccttctgacaaggaggaagaaaagtccacaaaagatgtctctgaaaaggaagacaaggacaaaaacaaagaaaagatcccaaggaagatgctgtccagagactccagccaggaatatacggactccactggaatagacctacatgaatttcttgtaaatacactgaaaaagaacccaagggacagaatgatgctgctaaaattagaacaggagattctggaatttattaatgacaacaataatcagttcaagaagttccctcagatgacctcatatcaccggatgctattacaccgggtagctgcctattttgggatggaccacaatgttgatcaaactgggaaagctgtcatcatcaacaaaactagtaacacaagaatccctgaacagaggttctcagaacatataaaggatgagaagaatacagaatttcaacagaggttcattctcaagagagatgatgccagtatggaccgagatgataaccagactggccagaacggatatctaaatgacatcagactctccaaagaagccttttcttctagctctcacaagagaaggcagatttttagggggaaccgtgaaggactgagccgcacctcaagcagccgccagagcagcacagacagcgaactcaaatccctggagccacgcccttggagcagcacagactctgatggctctgtccggagcatgcgaccccctgtcaccaaagctagcagcttcagtggaatctctatccttacccgaggtgacagcatcggcagcagtaaaggcggcagtgcgggaaggatctccaggccaggtatggcactaggtgccccagaagtgtgcaaccaggtcacctcatcccagtctgtccgggggcttctcccttgtactgcccagcagcaacagcagcagcagcagcagcaacttcctgctctcccacccacgcctcagcaacagccacccttgaataatcacatgatctcacaggcagatgacctcagcaacccctttggacaaatgagccttagtcgccaaggttctactgaagcagctgacccatctgcagctctattccagaccccacttatctcccagcaccctcagcagactagcttcatcatggcttccacgggtcagcccctccccacttccaactattccacctctagccatgcaccacctactcagcaagttctgccaccccaggggtacatgcagccccctcaacagatccaggtttcttactatccccctggacaatatcctaactccaaccagcaatatcgacctctctctcacccggtggcctatagcccccaacgtggtcagcagctgcctcagccatcccagcagcctggtttacagcccatgatgcctaaccagcagcaggcggcttaccaaggcatgattggggtccagcagccacagaaccagggcctgctcagcagccagaggagcagcatggggggccagatgcaaggcctggtggttcagtacactccactgccttcttaccaagttccagtgggtagtgactcgcaaaatgtggtccagccgcctttccagcaacccatgctggtccctgtgagccagtctgtgcaaggaggcctcccagcagcgggggtaccagtgtactatagcatgatcccacctgctcagcagaacggtacgagcccttctgtagggtttctgcaaccccctggctctgagcagtaccagatgcctcagtctccctctccctgcagtccaccacagatgccacagcagtactcaggagtgtcaccttctggaccaggtgtagtggtcatgcagctgaatgtccctaatggaccccagccccctcagaacccatccatggtccagtggagtcattgtaaatactacagcatggaccagcgggggcagaagcctggagacctgtacagtcctgacagcagcccccaggccaacacacaaatgagcagcagccctgtcacatctcctacccagtctccagcaccctctcctgtcaccagcctcagcagtgtctgcacaggactcagtcccctgcctgtcctcacacagttcccccggcctgggggtccagcacagggtgatgggcgctactcccttttgggccagccattacagtacaatctgtccatctgccctcccttgctccatggccagtcaacttacacggtgcaccagggacagagtggactgaagcatggaaaccggggcaagagacaagcactcaaatctgcctccactgacctggggacagcagatgttgtcctggggcgggtgctggaggtgacagatctccctgagggcatcacccgtactgaggcggacaaactcttcacgcagctcgccatgtctggcgccaagatccagtggctcaaggatgctcaggggctgcctggagggggtgggggggacaacagtgggactgctgagaatggccgccactcggacctcgctgccttgtacaccattgtggctgtgttccccagccccctggctgcccaaaatgcctcccttcgtctcaacaactccgtgagtcgcttcaaacttcgaatggccaaaaagaactatgacctgaggatcctggagcgagccagctcccaataa

SEQ ID NO: 470 - DNA, 1950 bp, Homo sapiens;
atgtccctaatggtctcggctggccggggcctgggggccgtgtggtccccaacccacgtgcaggtgacggtgctgcaggcgcggggcctgcgggccaagggccccgggggcacgagcgacgcgtacgcggtgatccaggtgggcaaggagaagtacgccacctccgtgtcggagcgcagcctgggcgcgcccgtgtggcgcgaggaggccaccttcgagctgccatcgctgctgtcctccggacccgcggccgccgccaccctgcagctcaccgtgctgcaccgcgcgctgctcggcctcgacaagttcctgggccgcgccgaggtggacctgcgggatctgcaccgcgaccagggccgcaggaagacgcagtggtataagttgaaatccaaaccaggaaagaaggacaaggagcgaggagaaattgaggttgacatccagtttatgagaaacaacatgactgccagcatgtttgacctttctatgaaagacaagtctcggaatccatttggaaagctgaaggacaagatcaaggggaagaataaggacagtgggtcagacaccgcctccgccatcatccctagcacgacaccttcggtcgacagtgatgatgagtctgtggttaaagacaagaaaaagaaatcaaagatcaagaccttactttccaagtcaaatttgcagaagacgcctctttcccagtccatgtctgtcctgccgacttcaaagccagaaaaagtgctgcttcgtcccggagactttcagtcccagtgggatgaagatgacaatgaggatgagtcctcctcggcctcggatgtcatgtctcacaagagaacagcgagtacggatcttaagcaactgaaccaggtcaactttacccttcccaagaaggaaggactttcctttcttggtggccttcggtctaagaatgatgtcctttcccgctctaatgtctgcatcaatgggaaccatgtttacctggagcagccagaagccaagggtgagatcaaggatagcagcccgtcctcctccccatcccccaagggcttcagaaagaagcatttgttctcttctacagagaacctggcggctgggtcttggaaggagcctgctgaaggaggtgggctgtcttctgacaggcagctctccgaatcttccaccaaggactccttgaagtctatgaccctgccgtcctaccgacctgccccactggtcagtggggacctcagggaaaacatggcccccgcaaactcagaggccacaaaagaagctaaggagagcaagaagccagagagcaggaggtcctctttgctgtctctgatgacggggaagaaggatgtggctaagggcagtgaaggtgaaaaccctctcacggtcccagggagggagaaggaaggcatgctgatgggggttaagccgggggaggacgcatcggggcctgctgaagaccttgtgagaagatctgagaaagatactgcagctgttgtctccagacagggcagctccctgaacctctttgaagatgtgcagatcacagaaccagaagctgagccagagtccaagtctgaaccgagacctccaatttcctctccgagggctccccagaccagagctgtcaagccccgacttcatcctgtgaagccaatgaatgcaatggccaccaaggttgctaactgcagcttgggaactgccaccatcatcagtgagaacttgaacaatgaggtcatgatgaagaaatacagcccctcggaccctgcatttgcatatgcgcagctgacccacgatgagctgattcagctggtcctcaaacagaaggaaacgataagcaagaaggagttccaggtccgcgagctggaagactacattgacaacctgcttgtcagggtcatggaagaaacccccaatatcctccgcatcccgactcaggttggcaaaaaagcaggaaagatgtaa

SEQ ID NO: 471 - DNA, 648 bp, Homo sapiens;
atggcaactgcaccatacaactactcttacatctttaaatatattattattggggacatgggagtaggaaaatcttgcttgcttcatcaatttacagaaaaaaaatttatggctgattgtcctcacacaattggtgttgaatttggtacaagaataatcgaagttagtggccaaaaaataaaactgcagatttgggatacggcaggacaggagcgatttagggctgttacacggagctactacagaggagctgcgggagctcttatggtctatgatatcactagaagaagtacatataaccacttaagcagctggttgacagatgcaaggaatctcaccaatccaaatactgtaataattctcataggaaataaagcagatttggaggcacagagagatgttacatatgaagaagccaaacagtttgctgaagaaaatggcttattgttcctcgaagcgagtgcaaaaacgggagagaatgtagaagatgccttccttgaggctgccaagaaaatctatcagaacattcaggatggaagcttggatctgaatgctgctgagtctggtgtacaacacaaaccttcagccccgcagggaggccggctaaccagtgaaccccaaccccagagagaaggctgtggctgctag

SEQ ID NO: 472 - DNA, 588 bp, Homo sapiens;
atgatggcgatacgggagctcaaagtgtgccttctcggggacactggggttgggaaatcaagcatcgtgtgtcgatttgtccaggatcactttgaccacaacatcagccctactattggggcatcttttatgaccaaaactgtgccttgtggaaatgaacttcacaagttcctcatctgggacactgctggtcaggaacggtttcattcattggctcccatgtactatcgaggctcagctgcagctgttatcgtgtatgatattaccaagcaggattcattttataccttgaagaaatgggtcaaggagctgaaagaacatggtccagaaaacattgtaatggccatcgctggaaacaagtgcgacctctcagatattagggaggttcccctgaaggatgctaaggaatacgctgaatccataggtgccatcgtggttgagacaagtgcaaaaaatgctattaatatcgaagagctctttcaaggaatcagccgccagatcccacccttggacccccatgaaaatggaaacaatggaacaatcaaagttgagaagccaaccatgcaagccagccgccggtgctgttga

SEQ ID NO: 473 - DNA, 642 bp, Homo sapiens;
atggctgagacctacgacttcctcttcaaattcctggtgattggcagtgcaggaactggcaaatcatgtctccttcatcagttcattgagaataagttcaaacaggactccaaccacacaatcggcgtggagtttggatcccgggtggtcaacgtgggtgggaagactgtgaagctacagatttgggacacggctggccaggagcggtttcggtcagtgacgcggagttattaccgaggggcggctggagccctgctggtgtacgacatcaccagccgggagacatacaactcactggctgcctggctgacggatgcccgcaccctggccagccccaacatcgtggtcatcctctgtggcaacaagaaggacctggaccctgagcgggaggtcactttcctggaggcctcccgctttgcccaggagaatgagctgatgttcctggagaccagcgctctcacaggcgagaacgtggaggaggcgttcctcaagtgtgcccgcactatcctcaacaagattgactcaggcgagctagacccggagaggatgggctctggcattcagtacggggatgcgtccctccgccagcttcggcagcctcggagtgcccaggccgtggcccctcagccgtgtggctgctga

SEQ ID NO: 474 - DNA, 624 bp, Homo sapiens;
atgacctctaggaagaaagtgttgctgaaggttatcatcctgggagattctggagtcgggaagacatcactcatgaaccagtatgtgaataagaaattcagcaatcagtacaaagccacaataggagctgactttctgaccaaggaggtgatggtggatgacaggctagtcacaatgcagatatgggacacagcaggacaggaacggttccagtctctcggtgtggccttctacagaggtgcagactgctgcgttctggtatttgatgtgactgcccccaacacattcaaaaccctagatagctggagagatgagtttctcatccaggccagtccccgagatcctgaaaacttcccatttgttgtgttgggaaacaagattgacctcgaaaacagacaagtggccacaaagcgggcacaggcctggtgctacagcaaaaacaacattccctactttgagaccagtgccaaggaggccatcaacgtggagcaggcgttccagacgattgcacggaatgcacttaagcaggaaacggaggtggagctgtacaacgaatttcctgaacctatcaaactggacaagaatgaccgggccaaggcctcggcagaaagctgcagttgctga

SEQ ID NO: 475 - DNA, 1947 bp, Homo sapiens;
atggagcacatacagggagcttggaagacgatcagcaatggttttggattcaaagatgccgtgtttgatggctccagctgcatctctcctacaatagttcagcagtttggctatcagcgccgggcatcagatgatggcaaactcacagatccttctaagacaagcaacactatccgtgttttcttgccgaacaagcaaagaacagtggtcaatgtgcgaaatggaatgagcttgcatgactgccttatgaaagcactcaaggtgaggggcctgcaaccagagtgctgtgcagtgttcagacttctccacgaacacaaaggtaaaaaagcacgcttagattggaatactgatgctgcgtctttgattggagaagaacttcaagtagatttcctggatcatgttcccctcacaacacacaactttgctcggaagacgttcctgaagcttgccttctgtgacatctgtcagaaattcctgctcaatggatttcgatgtcagacttgtggctacaaatttcatgagcactgtagcaccaaagtacctactatgtgtgtggactggagtaacatcagacaactcttattgtttccaaattccactattggtgatagtggagtcccagcactaccttctttgactatgcgtcgtatgcgagagtctgtttccaggatgcctgttagttctcagcacagatattctacacctcacgccttcacctttaacacctccagtccctcatctgaaggttccctctcccagaggcagaggtcgacatccacacctaatgtccacatggtcagcaccaccctgcctgtggacagcaggatgattgaggatgcaattcgaagtcacagcgaatcagcctcaccttcagccctgtccagtagccccaacaatctgagcccaacaggctggtcacagccgaaaacccccgtgccagcacaaagagagcgggcaccagtatctgggacccaggagaaaaacaaaattaggcctcgtggacagagagattcaagctattattgggaaatagaagccagtgaagtgatgctgtccactcggattgggtcaggctcttttggaactgtttataagggtaaatggcacggagatgttgcagtaaagatcctaaaggttgtcgacccaaccccagagcaattccaggccttcaggaatgaggtggctgttctgcgcaaaacacggcatgtgaacattctgcttttcatggggtacatgacaaaggacaacctggcaattgtgacccagtggtgcgagggcagcagcctctacaaacacctgcatgtccaggagaccaagtttcagatgttccagctaattgacattgcccggcagacggctcagggaatggactatttgcatgcaaagaacatcatccatagagacatgaaatccaacaatatatttctccatgaaggcttaacagtgaaaattggagattttggtttggcaacagtaaagtcacgctggagtggttctcagcaggttgaacaacctactggctctgtcctctggatggccccagaggtgatccgaatgcaggataacaacccattcagtttccagtcggatgtctactcctatggcatcgtattgtatgaactgatgacgggggagcttccttattctcacatcaacaaccgagatcagatcatcttcatggtgggccgaggatatgcctccccagatcttagtaagctatataagaactgccccaaagcaatgaagaggctggtagctgactgtgtgaagaaagtaaaggaagagaggcctctttttccccagatcctgtcttccattgagctgctccaacactctctaccgaagatcaaccggagcgcttccgagccatccttgcatcgggcagcccacactgaggatatcaatgcttgcacgctgaccacgtccccgaggctgcctgtcttctag

SEQ ID NO: 476 - DNA, 621 bp, Homo sapiens;
atggctgccaacaagagtaagggccagagctccttggccctccacaaggtgatcatggttggcagcggaggcgttggcaagtcagccctgacgcttcagttcatgtatgacgagtttgtagaagactatgaacctaccaaagctgacagttatagaaagaaagtggttcttgatggggaagaagttcagatagatattctggacaccgctgggcaagaggactacgcagccattcgagataactactttcggagtggggaagggtttcttcttgtgttctcaatcacagaacatgaatcctttacagcaactgccgaattcagggaacagattctccgtgtgaaggctgaagaagataaaattccactgctcgtcgtgggaaacaagtctgacctagaggagcggaggcaggtgcctgtggaggaggccaggagtaaagccgaagagtggggcgtgcagtacgtggagacgtcagcgaagacccgggccaacgtggacaaggtgttctttgacctaatgagagaaatcagaacaaagaagatgtcagaaaacaaagacaagaatggcaagaaaagcagcaagaacaagaaaagttttaaagaaagatgttgcttactatga

SEQ ID NO: 477 - DNA, 1389 bp, Homo sapiens;
atggccagcaacagcagctcctgcccgacacctgggggcgggcacctcaatgggtacccggtgcctccctacgccttcttcttcccccctatgctgggtggactctccccgccaggcgctctgaccactctccagcaccagcttccagttagtggatatagcacaccatccccagccaccattgagacccagagcagcagttctgaagagatagtgcccagccctccctcgccaccccctctaccccgcatctacaagccttgctttgtctgtcaggacaagtcctcaggctaccactatggggtcagcgcctgtgagggctgcaagggcttcttccgccgcagcatccagaagaacatggtgtacacgtgtcaccgggacaagaactgcatcatcaacaaggtgacccggaaccgctgccagtactgccgactgcagaagtgctttgaagtgggcatgtccaaggagtctgtgagaaacgaccgaaacaagaagaagaaggaggtgcccaagcccgagtgctctgagagctacacgctgacgccggaggtgggggagctcattgagaaggtgcgcaaagcgcaccaggaaaccttccctgccctctgccagctgggcaaatacactacgaacaacagctcagaacaacgtgtctctctggacattgacctctgggacaagttcagtgaactctccaccaagtgcatcattaagactgtggagttcgccaagcagctgcccggcttcaccaccctcaccatcgccgaccagatcaccctcctcaaggctgcctgcctggacatcctgatcctgcggatctgcacgcggtacacgcccgagcaggacaccatgaccttctcggacgggctgaccctgaaccggacccagatgcacaacgctggcttcggccccctcaccgacctggtctttgccttcgccaaccagctgctgcccctggagatggatgatgcggagacggggctgctcagcgccatctgcctcatctgcggagaccgccaggacctggagcagccggaccgggtggacatgctgcaggagccgctgctggaggcgctaaaggtctacgtgcggaagcggaggcccagccgcccccacatgttccccaagatgctaatgaagattactgacctgcgaagcatcagcgccaagggggctgagcgggtgatcacgctgaagatggagatcccgggctccatgccgcctctcatccaggaaatgttggagaactcagagggcctggacactctgagcggacagccggggggtggggggcgggacgggggtggcctggcccccccgccaggcagctgtagccccagcctcagccccagctccaacagaagcagcccggccacccactccccgtga

SEQ ID NO: 478 - DNA, 981 bp, Homo sapiens;
atggactacagccaccaaacgtccctagtcccatgtggacaagataaatacatttccaaaaatgaacttctcttgcatctgaagacctacaacttgtactatgaaggccagaatttacagctccggcaccgggaggaagaagacgagttcattgtggaggggctcctgaacatctcctggggcctgcgccggcccattcgcctgcagatgcaggatgacaacgaacgcattcgaccccctccatcctcctcctcctggcactctggctgtaacctgggggctcagggaaccactctgaagcccctgactgtgcccaaagttcagatctcagaggtggatgccccgccggagggtgaccagatgccaagctccacagactccaggggcctgaagcccctgcaggaggacaccccacagctgatgcgcacacgcagtgatgttggggtgcgtcgccgtggcaatgtgaggacgcctagtgaccagcggcgaatcagacgccaccgcttctccatcaacggccatttctacaaccataagacatccgtgttcacaccagcctatggctctgtcaccaacgtccgcatcaacagcaccatgaccaccccacaggtcctgaagctgctgctcaacaaatttaagattgagaattcagcagaggagtttgccttgtacgtggtccatacgagtggtgagaaacagaagctgaaggccaccgattacccgctgattgcccgaatcctccagggcccatgtgagcagatctccaaagtgttcctaatggagaaggaccaggtggaggaagtcacctacgacgtggcccagtatataaagttcgagatgccggtacttaaaagcttcattcagaagctccaggaggaagaagatcgggaagtaaagaagctgatgcgcaagtacaccgtgctccggctaatgattcgacagaggctggaggagatagccgagaccccagcaacaatctga

SEQ ID NO: 479 - DNA, 1272 bp, Homo sapiens;; identical to SEQ ID NO: 74

SEQ ID NO: 480 - DNA, 1221 bp, Homo sapiens;
atgggcaaagtgtggaaacagcagatgtaccctcagtacgccacctactattacccccagtatctgcaagccaagcagtctctggtcccagcccaccccatggcccctcccagtcccagcaccaccagcagtaataacaacagtagcagcagtagcaactcaggatgggatcagctcagcaaaacgaacctctatatccgaggactgcctccccacaccaccgaccaggacctggtgaagctctgtcaaccatatgggaaaatagtctccacaaaggcaattttggataagacaacgaacaaatgcaaaggttatggttttgtcgactttgacagccctgcagcagctcaaaaagctgtgtctgccctgaaggccagtggggttcaagctcaaatggcaaagcaacaggaacaagatcctaccaacctctacatttctaatttgccactctccatggatgagcaagaactagaaaatatgctcaaaccatttggacaagttatttctacaaggatactacgtgattccagtggtacaagtcgtggtgttggctttgctaggatggaatcaacagaaaaatgtgaagctgttattggtcattttaatggaaaatttattaagacaccaccaggagtttctgcccccacagaacctttattgtgtaagtttgctgatggaggacagaaaaagagacagaacccaaacaaatacatccctaatggaagaccatggcatagagaaggagaggtgagacttgctggaatgacacttacttacgacccaactacagctgctatacagaacggattttatccttcaccatacagtattgctacaaaccgaatgatcactcaaacttctattacaccctatattgcatctcctgtatctgcctaccaggtgcaaagtccttcgtggatgcaacctcaaccatatattctacagcaccctggtgccgtgttaactccctcaatggagcacaccatgtcactacagcccgcatcaatgatcagccctctggcccagcagatgagtcatctgtcactaggcagcaccggaacatacatgcctgcaacgtcagctatgcaaggagcctacttgccacagtatgcacatatgcagacgacagcggttcctgttgaggaggcaagtggtcaacagcaggtggctgtcgagacgtctaatgaccattctccatatacctttcaacctaataagtaa

SEQ ID NO: 481 - DNA, 3195 bp, Homo sapiens;
atgcctgtgcaggcagctcaatggacagaatttctgtcctgtccaatctgctataatgaatttgatgagaatgtgcacaaacccatcagtttaggttgttcacacactgtttgcaagacctgcttgaataaacttcatcgaaaagcttgtccttttgaccagactgccatcaacacagatattgatgtacttcctgtcaacttcgcacttctccagttagttggagcccaggtaccagatcatcagtcaattaagttaagtaatctaggtgagaataaacactatgaggttgcaaagaaatgcgttgaggatttggcactctacttaaaaccactaagtggaggtaaaggtgtagctagcttgaaccagagtgcactgagccgtccaatgcaaaggaaactggtgacacttgtaaactgtcaactggtggaggaagaaggtcgtgtaagagccatgcgagcagctcgttcccttggagaaagaactgtaacagaactgatattacagcaccagaaccctcagcagttgtctgccaatctatgggccgctgtcagggctcgaggatgccagtttttagggccagctatgcaagaagaggccttgaagctggtgttactggcattagaagatggttctgccctctcaaggaaagttctggtactttttgttgtgcagagactagaaccaagatttcctcaggcatcaaaaacaagtattggtcatgttgtgcaactactgtatcgagcttcttgttttaaggttaccaaaagagatgaagactcttccctaatgcagctgaaggaggaatttcggagttatgaagcattacgcagagaacatgatgcccaaattgttcatattgccatggaagcaggactccgtatttcacctgaacagtggtcctctcttttgtatggtgatttggctcataaatcacacatgcagtctatcattgataagctacagtctccagagtcatttgcaaagagtgtccaggaattgacaattgttttgcaacgaacaggtgacccagctaacttaaatagactgaggcctcatttagagcttcttgcaaacatagaccctaatccagacgctgtttcaccaacttgggagcagctggaaaatgcaatggtagctgttaaaacagtagttcatggccttgtggacttcatacaaaattatagtagaaaaggccatgagacccctcagcctcagccaaacagcaaatacaagactagcatgtgccgagatttgcgacagcaagggggttgtccacgaggaacaaattgtacatttgcccattctcaggaagagcttgaaaagtatcgattaaggaacaaaaagatcaatgccactgtaagaacgtttcctcttctaaataaagttggtgtaaacaacactgtcacaaccacagccggaaatgtcatttctgtcataggaagtactgaaacaacagggaaaattgttccaagtacaaacggaatttcaaatgcagaaaacagtgtttcccagctaatctcacgtagtactgacagtaccttaagagctctggagaccgtgaagaaagtgggaaaggttggcgctaatggtcagaatgctgctgggccctctgcagattctgtaactgaaaataaaattggttctccacccaagactcctgtaagtaatgtagcagctacctcagctgggccctctaatgttggaacagagctgaattctgtgcctcaaaaatccagcccatttctaactagagtaccagtatatcctccgcattctgaaaacattcagtattttcaagatccaaggactcagataccctttgaagtcccacagtacccacagacaggatactatccaccacctccaacggtaccagctggtgtggctccctgtgttcctcgctttgtgaggtccaataacgttccagagtcctccctcccacctgcttccatgccatatgccgatcattacagtacattttcccctcgagatcgaatgaattcttctccttaccagcctcctcctccgcagccgtatggaccagttcctccagtaccttctggaatgtatgctcctgtgtacgacagcaggcgcatctggcgcccacctatgtaccaacgagatgacattattagaagcaattctttacctccaatggatgtgatgcactcatctgtctatcagacatctttgcgggaaagatataactcattagatggatattattcggtggcttgtcagccaccaagtgagccaaggacaactgtgcctttaccaagggaaccttgtggtcatttgaagaccagttgcgaggagcagataagaagaaagccagatcagtgggcacagtaccacactcagaaagcacctcttgtctcttcaactcttcctgtggcaacacagtcaccaacaccaccttctcctctgttcagtgtagactttcgtgcggatttctcagagagtgtgagtggtacaaaatttgaagaagatcatctttcccattattctccctggtcttgtggcaccataggctcctgtataaatgccattgattcagagcccaaagatgtcattgctaattcaaatgctgtgttaatggacctggacagtggtgatgttaagagaagagtacatttatttgaaacccagagaaggacaaaagaagaagatccaataattccctttagtgatggacccatcatctcaaaatggggtgcgatttccagatcttcccgtacaggttaccataccacagatcctgtccaggccactgcttcccaaggaagtgcgactaagcccatcagtgtatcagattatgtcccttatgtcaatgctgttgattcaaggtggagttcatatggcaacgaggccacatcatcagcacactatgttgaaagggacagattcattgttactgatttatctggtcatagaaagcattccagtactggggaccttttgagccttgaacttcagcaggccaagagcaactcattacttcttcagagagaggccaatgctttggccatgcaacagaagtggaattccctggatgaaggccgtcaccttaccttaaaccttttaagcaaggaaattgaactaagaaatggagaggtaaagaaactgaacctttcggcttcatgcttaatgtatttgttttctgctgctgcatcttggttataccattactga

SEQ ID NO: 482 - DNA, 4701 bp, Homo sapiens;
atgacagcggacaaagacaaagacaaagacaaagagaaggaccgggaccgagaccgggaccgagagagagagaaaagagacaaagcaagagagagtgagaattcaaggccacgccggagctgtaccttggaaggaggagccaaaaattatgctgagagtgatcacagtgaagacgaggacaatgacaacaatagtgccaccgcagaggagtccacgaagaagaataagaagaaaccaccgaaaaaaaagtctcgttatgaaaggacagataccggtgagataacatcctacatcactgaagatgatgtggtctacagaccaggagactgtgtgtatatcgagagtcggaggccaaacacaccgtatttcatctgtagcattcaagacttcaaactggtccacaactcccaggcctgttgcagatctccaactcctgctttgtgtgaccccccagcatgctctctgccggtggcatcacagccaccacagcatctttctgaagccgggagagggcctgtagggagtaagagggaccatctcctcatgaacgtcaaatggtactaccgtcaatctgaggttccagattctgtgtatcagcatttggttcaggatcgacataatgaaaatgactctggaagagaacttgtcattacagacccagttatcaagaaccgagagctcttcatttctgattacgttgacacttaccatgctgctgcccttagagggaagtgtaacatctcccatttttctgacatatttgctgctagagagtttaaagcccgagtggattcatttttctacatattaggatataaccctgagacaaggaggctgaacagtacccagggggagattcgtgtcggtcctagtcatcaggccaaacttccagatctgcaaccatttccttctccagatggtgatacagtgacccaacatgaggaactggtctggatgcctggagttaacgactgtgacctccttatgtacttgagggcagcaaggagcatggcggcatttgcaggaatgtgtgatggaggctctacagaggacggctgtgtcgcagcctctcgggatgacaccactctgaatgcactgaacacactgcatgaaagcggttacgatgctggcaaagccctgcagcgcctggtgaagaagcctgtgcccaagctcatcgagaagtgctggaccgaggacgaagtgaaacgcttcgttaagggactcaggcagtacgggaagaacttcttcagaattagaaaggagctgcttcccaataaggaaacaggggagctgatcaccttctattactattggaagaagacccccgaagcagccagctcccgagcccatcgtaggcaccgcaggcaggccgtgttcaggaggattaagactcgcaccgcgtccacacccgtcaacacaccctccagacccccgtccagtgaattcttggacctaagttcagccagtgaagatgacttcgacagtgaggacagtgagcaggagctgaaggggtacgcctgccgccactgcttcaccaccacctccaaagattggcaccacggaggccgggagaacatcctgctttgcaccgactgtcgcatccacttcaagaaatacggtgagctcccgcccattgagaagcccgtggacccgccaccgtttatgttcaaacccgtcaaggaagaggatgatgggctcagtgggaagcatagcatgaggacacggcggagtcggggctcgatgtcgacactacgcagtggtcggaagaagcagccagccagccctgatggtcgcacctcacccatcaatgaagacatccgctccagcggccggaactcccccagcgctgccagtacctccagcaatgacagtaaagcagagacagtgaagaagtcggccaagaaggtgaaggaggaagcctcttcccctcttaagagtaacaaacgccagcgggagaaggtggcctctgatacggaggaggctgacaggaccagctccaagaagacaaaaacgcaggagatcagcaggcccaactcgccatctgaaggtgagggagagagttcagacagtcgcagcgtcaacgatgagggtagcagtgaccccaaagacatcgaccaggacaatcgcagcacgtccccgagcatccccagcccccaggacaatgagagtgactcggactcgtcagcccagcagcagatgctgcaggcccagcccccagccttgcaggctcccactggggtcaccccagctccctcctcagctcctccagggacccctcagctgcccacgccagggcccacgccctctgccactgcagttcccccacagggctcccccacggcctcccaggcccctaaccagccacaggctcccacagcgcctgttccccacacccacatccaacaggcaccggccttgcacccccagcggccgccctcaccgcatcccccgccgcatccctcgccacatcccccgctgcagcctctgactgggtcggcgggccagccttctgcaccctctcatgcccagcccccactgcacggtcagggcccacccggccctcacagcctgcaggctgggcccctgctgcagcacccaggccccccacagccctttggcctccctccccaggcctcccaaggccaggcccctctggggacctccccagcagcagcgtaccctcacacctccctgcagctgccagcctctcagtcagcgctgcagtcccaacagcctccacgggagcagcccctgccaccagcgcccttggccatgccccacatcaagcccccgcctaccactcccatcccccagctgccggcgccacaggcccacaagcaccctccccacctctcggggccctcacccttctccatgaatgccaacctgcctccccctccagccctgaagcccctgagctccctgtccacacatcaccccccgtcggctcaccccccacccctgcaactcatgcctcagagccagccattgccctcctcgcccgcccagccccccgggctgacccagagccagaacctgcccccgccccctgcctcccacccccctacaggcctccaccaggtggccccccaacccccgtttgctcagcacccctttgtccctggaggccctcctcccatcacccctccgacctgcccctccacctctaccccaccggcgggacctggcacctcggcccagccaccctgctctggtgcggcggcttcaggaggcagcatagcgggggggtcgtcctgcccactccccaccgtccagatcaaggaggaggctctggacgacgctgaggagcctgagagcccccctcccccaccaaggagcccgtccccggagcccactgtggtggacacccccagtcacgccagccagtcagctaggttctacaaacacctggaccggggctacaactcgtgtgcccggacagacctgtacttcatgcctctggccgggtccaagctggccaagaagagggaggaggccattgagaaggccaagcgcgaggctgagcagaaagcccgagaggagcgagagcgggagaaggagaaggagaaggagcgggagcgggagcgagagcgggagcgcgaggcagagcgggcggctaaggcgtccagctcagcgcatgaaggtcgcctcagtgacccacagctcagtggtcctggccacatgcggccatccttcgagccaccaccaaccaccattgctgctgtgcccccctacatcgggcccgacacacctgcccttcggactctgagcgagtacgcccggccccacgtcatgtcgcccaccaaccgcaaccaccccttctacatgccccttaaccccacggaccccctgctggcctaccacatgcctggcctctacaacgtcgaccccaccatccgcgagcgggagctccgggagcgggagatccgagagcgggagatccgagagcgggagctgcgggagaggatgaagccgggcttcgaggtgaagcccccagagctggaccccctgcacccagccgccaaccccatggagcactttgcccggcacagcgccctcaccatccccccgaccgccgggccccacccttttgcttctttccacccgggcctgaaccccttggagagggagagactggccctggcgggcccccagctgcggcccgagatgagctaccctgacagactggcagccgagcgtatccacgcagagcgcatggcatcgctgaccagcgatcccctggcccgactgcagatgttcaacgtgactccgcaccatcaccagcactctcacattcactcccacctccacctccaccagcaggaccccctccaccaaggttcagcaggccccgttcacccgctggtcgaccccctgactgccggtccccacctggctcgcttcccctacccgcctggcactctccccaaccctctgcttggacagcccccacacgagcacgagatgcttcgccacccagttttcggcaccccctacccccgtgacctgcctggggccatcccaccccccatgtcagcagcccaccagctgcaggccatgcatgcccagtcggccgagctgcagagactggccatggagcagcagtggctgcatggacacccccacatgcatggtggccacctaccaagtcaggaagattattacagtcgactgaagaaagaaggtgacaagcagttataa

SEQ ID NO: 483 - DNA, 1701 bp, Homo sapiens;
atgccagggaagcccaagcacctgggcgtccccaacgggcgcatggttctggctgtgtcagatggagagctgagcagcacgacggggccccagggccagggcgagggccgcggcagctctctcagcatccacagcctccccagtggtcccagcagccccttcccaaccgaggagcagcctgtggccagctgggccctgtccttcgagcggctgttgcaggacccgctgggcctggcttacttcactgagttcctgaagaaggagttcagcgcggaaaacgtgactttctggaaggcctgcgagcgcttccagcagatcccggccagcgatacccagcagctagctcaggaggcccgcaacatctaccaggagttcctgtccagccaggcgctgagcccagtgaacatcgaccgtcaggcctggcttggcgaggaggtgctggccgagccccggccggacatgtttcgggcacagcagcttcagatcttcaacttgatgaagttcgacagctatgcgcgcttcgtcaagtccccgctgtaccgcgagtgcctgctagccgaagccgagggacgccctctgcgggaacctggctcctcgcgcctcggcagccctgacgccacgaggaagaagccgaagctgaagcccgggaagtcgctgccgctgggtgtggaggagttggggcagctgccacccgttgagggtcctgggggccgccctctccgcaagtccttccgccgggagctgggcgggactgcaaacgccgccttgcgccgagagtctcagggctccctcaactcctccgccagcctggaccttggcttcctagccttcgtcagcagcaaatctgagagccaccggaagagccttgggagcacggagggtgaaagtgaaagccggccagggaagtactgctgtgtgtacctgcccgatggcacagcctccttggccctggccagacctggcctcaccatccgagacatgctggcagggatctgtgagaaacgaggcctctctctacctgacatcaaggtctacctggtgggcaatgaacaggccctggtcctggatcaggactgcaccgtgctggcggatcaggaagtgcggctggaaaacaggatcaccttcgagctggagctgacggcgctggagcgcgtggtacgaatctcagccaagcccaccaagcggctgcaggaggcgctgcagcccattctggagaagcacggcttgagcccgctagaggtggtgctgcaccggccaggcgagaaacagcctctggatctggggaagctagtgagctcggtggcggcccagagactggttttggacactcttccaggtgtgaagatctccaaagcccgtgacaaatctccctgccgcagccagggctgcccacctagaactcaggataaggccacccatccccctccagcgtcccccagttctctggtgaaggtgcccagtagtgccactggaaagcggcagacctgtgacatcgaaggcctggtggagctgctgaaccgggtgcagagcagcggggcccacgaccagaggggccttctgaggaaagaggacctggtacttccagaatttctgcagctgcccgcccaagggcccagctccgaggagaccccaccacagaccaaatcagcagcccagcccatcgggggatccttgaactccaccaccgactcagccctctga

SEQ ID NO: 484 - DNA, 654 bp, Homo sapiens;
atgcccaccccgcatgaggctgagaagcagatcacagggccagaggaggcggaccggcccccttcaatgtccagtcatgatacagcctctccagcggcccccagccgcaacccctgctgcctgtgctggtgctgctgctgtagctgctcctggaaccaagagcggcggcgcgcgtggcaggcctcccgggagagcaagctgcagcccctccccagctgtgaagtatgtgccacgccaagtcctgaggaggtgcagagctgggcgcagtcttttgacaagctgatgcacagcccagcgggacgcagcgtgttccgggcgttcctgcggacagagtacagcgaggagaacatgctcttctggttggcctgcgaggagctgaaggccgaggccaaccagcatgtggtagacgagaaggcgaggctcatctacgaggactacgtatccatcctgtcccccaaggaggtgagcctggactcccgtgtgcgggagggcatcaacaagaagatgcaggagccgtccgcacacacgttcgacgacgcgcagctgcagatctacacgctcatgcaccgggactcctacccccgcttcctcagctctcccacctaccgtgccctgctgctgcaggggccatcacagtcctcctccgaggcctag

SEQ ID NO: 485 - DNA, 576 bp, Homo sapiens;
atgcagagcatcaagtgcgtggtggtgggtgatggggctgtgggcaagacgtgcctgctcatctgctacacaactaacgctttccccaaagagtacatccccaccgtgttcgacaattacagcgcgcagagcgcagttgacgggcgcacagtgaacctgaacctgtgggacactgcgggccaggaggagtatgaccgcctccgtacactctcctaccctcagaccaacgttttcgtcatctgtttctccattgccagtccgccgtcctatgagaacgtgcggcacaagtggcatccagaggtgtgccaccactgccctgatgtgcccatcctgctggtgggcaccaagaaggacctgagagcccagcctgacaccctacggcgcctcaaggagcagggccaggcgcccatcacaccgcagcagggccaggcactggccaagcagatccacgctgtgcgctacctcgaatgctcagccctgcaacaggatggtgtcaaggaagtgttcgccgaggctgtccgggctgtgctcaaccccacgccgatcaagcgtgggcggtcctgcatcctcttgtga

SEQ ID NO: 486 - DNA, 2958 bp, Homo sapiens;
atgatccgacacgccggggcgcccgcgcgcggggaccccacgggtccggttccagttgttggcaaaggagaggaagaggaagaggaagatggcatgcggctttgtctgccagccaacccgaaaaactgccttcctcaccgccggggcatcagcatcctggagaagctcatcaaaacatgcccggtgtggctgcagctgagtctgggccaggcagaggtggccaggatcctgcaccgggtggtggctgggatgttcctggttcgccgggacagcagctcgaagcagctggtgctctgtgtccactttccttctctgaacgaaagctcggccgaggtgctcgaatacaccattaaggaagaaaagtcgatattgtacctggaaggctcggctcttgtgtttgaggacatcttcagattgattgcgttctactgtgtcagtagagacttactgcccttcacactgcggctaccccaggccatccttgaggccagcagcttcacggaccttgagaccatcgccaacctgggtctgggtttctgggactcctcgctgaatcctccacaagaaagagggaagccagcagagcccccaagagaccgggcccccggattccccctagtctccagcctcaggcccacagcccatgacgcaaactgtgcctgtgaaatcgagctgtcggtaggaaatgaccgcctgtggtttgtgaatcctattttcatcgaggactgcagcagcgccctgcccaccgaccagccacctcttggaaattgccctgcacgccctttgccgcccacctctgatgccacctcacccacctccaggtgggccccacgccgcccaccaccccctcccccagtgctgcccctgcagccctgcagcccagcccagccccctgtgctccctgctcttgcccccgcccctgcctgtcctttgcccacctctcccccagtgcctgccccccacgtcacaccccatgccccaggtcccccagaccatccgaaccagccgcccatgatgacctgcgagagactcccatgccccactgcaggcctgggccccctcagggaggaagcgatgaagccaggggcagcctccagtcccttgcagcaggtccccgccccgccactgcctgcgaagaagaaccttcccactgcccctcccagacgccgcgtttccgagagggtgtccttagaagaccaaagtccggggatggcggcagagggggaccagctcagcctgcctccccaagggacctcagacggccctgaggacacgccccgggagagcacggagcaaggccaggacacagaggtgaaagccagcgatcctcacagcatgccagagctgcccaggacagccaaacaacccccagtcccgccccccaggaaaaaacggatctctcgacaactggcctcgaccctcccagctcccttagagaacgctgagctctgcacacaggcgatggccttggagacacccacgccgggtccacccagagagggccaaagccctgcttctcaggctgggactcagcaccctcctgcccaggccactgcccattcccagagctctccagagttcaagggctccctggcctccctctcagacagcttgggggtgtctgtcatggccaccgaccaggactcctactccaccagcagcacggaggaggagctggagcagttcagcagccccagcgtgaagaagaagccctccatgatcctgggcaaggctcggcaccggctgagctttgccagtttcagcagcatgttccacgctttcctctccaacaaccgcaagctgtacaagaaggtggtggagctggcgcaggacaagggctcgtactttggcagcctggtgcaggactacaaggtgtacagcctggagatgatggcgcgccagacctccagcacggagatgctgcaggagattcgcaccatgatgacccagctcaagagctacctgctgcagagcaccgagctcaaggccctggtggaccccgccctgcactccgaggaggagctcgaagcaattgtagagtctgccttgtacaaatgtgtcctgaagcccctgaaggaagccatcaactcatgcctgcatcagatccacagcaaggatggttcgctgcagcagctcaaggagaaccagttagtgatcctggccaccaccaccactgacctaggtgtgaccaccagcgtgccggaggtgcccatgatggagaagatcctgcagaagttcaccagcatgcacaaggcctactcacctgagaagaagatctccatcctgctcaagacctgcaaactcatctacgactccatggccctcggcaacccagggaagccctatggggcggatgacttcctgcctgtgctcatgtatgtgctggcccgcagcaacctcacggagatgcttctcaatgtggagtacatgatggagctcatggaccccgccctgcagctgggggagggttcctactatctgaccaccacctacggggccctggagcacatcaagagctacgacaagatcacggtgacccggcagctgagtgtggaggtgcaggactccatccaccgctgggagcgccggcgtactctcaacaaggcccgggcctcccgctcctccgtacaggacttcatctgcgtgtcgtacctggagcccgagcagcaggcgcggacgctggcgtcgcgggcggacacccaggcccaggcgctgtgcgcgcagtgcgcggagaagttcgcggtggagcggccgcaggcgcaccggctgttcgtgctggtggacgggcgctgcttccagctggcggacgacgcgctgccgcactgcatcaagggctacctgctgcgcagcgagcccaagcgcgacttccactttgtctaccggcccctggacggtggtggcggcggcggcggcgggagcccgccctgcctggtggtgcgggagcccaacttcctgtga

SEQ ID NO: 487 - DNA, 771 bp, Homo sapiens;
atgcgccctgcagccctgcgcggggccctgctgggctgcctctgcctggcgttgctttgcctgggcggtgcggacaagcgcctgcgtgacaaccatgagtggaaaaaactaattatggttcagcactggcctgagacagtatgcgagaaaattcaaaacgactgtagagaccctccggattactggacaatacatggactatggcccgataaaagtgaaggatgtaatagatcgtggcccttcaatttagaagagattaaggatcttttgccagaaatgagggcatactggcctgacgtaattcactcgtttcccaatcgcagccgcttctggaagcatgagtgggaaaagcatgggacctgcgccgcccaggtggatgcgctcaactcccagaagaagtactttggcagaagcctggaactctacagggagctggacctcaacagtgtgcttctaaaattggggataaaaccatccatcaattactaccaagttgcagattttaaagatgcccttgccagagtatatggagtgatacccaaaatccagtgccttccaccaagccaggatgaggaagtacagacaattggtcagatagaactgtgcctcactaagcaagaccagcagctgcaaaactgcaccgagccgggggagcagccgtcccccaagcaggaagtctggctggcaaatggggccgccgagagccggggtctgagagtctgtgaagatggcccagtcttctatcccccacctaaaaagaccaagcattga

SEQ ID NO: 488 - DNA, 1260 bp, Homo sapiens;
atgagctgcgcggggcgggcgggccctgcccggctcgccgcgctcgccctgctgacctgcagcctgtggccggcacgggcagacaacgcgagccaggagtactacacggcgctcatcaacgtgacggtgcaggagcccggccgcggcgccccgctcacgtttcgcatcgaccgcgggcgctacgggcttgactcccccaaggccgaggtccgcggccaggtgctggcgccgctgcccctccacggagttgctgatcatctgggctgtgatccacaaacccggttctttgtccctcctaatatcaaacagtggattgccttgctgcagaggggaaactgcacgtttaaagagaaaatatcacgggccgctttccacaatgcagttgctgtagtcatctacaataataaatccaaagaggagccagttaccatgactcatccaggcactggagatattattgctgtcatgataacagaattgaggggtaaggatattttgagttatctggagaaaaacatctctgtacaaatgacaatagctgttggaactcgaatgccaccgaagaacttcagccgtggctctctagtcttcgtgtcaatatcctttattgttttgatgattatttcttcagcatggctcatattctacttcattcagaagatcaggtacacaaatgcacgcgacaggaaccagcgtcgtctcggagatgcagccaagaaagccatcagtaaattgacaaccaggacagtaaagaagggtgacaaggaaactgacccagactttgatcattgtgcagtctgcatagagagctataagcagaatgatgtcgtccgaattctcccctgcaagcatgttttccacaaatcctgcgtggatccctggcttagtgaacattgtacctgtcctatgtgcaaacttaatatattgaaggccctgggaattgtgccgaatttgccatgtactgataacgtagcattcgatatggaaaggctcaccagaacccaagctgttaaccgaagatcagccctcggcgacctcgccggcgacaactcccttggccttgagccacttcgaacttcggggatctcacctcttcctcaggatggggagctcactccgagaacaggagaaatcaacattgcagtaacaaaagaatggtttattattgccagttttggcctcctcagtgccctcacactctgctacatgatcatcagagccacagctagcttgaatgctaatgaggtagaatggttttga

SEQ ID NO: 489 - DNA, 693 bp, Homo sapiens;
atgggacagcaaatttcggatcagacacagttggttattaacaagttaccagaaaaagtagcaaaacatgttacgttggttcgagagagtggctccttaacttatgaagaatttcttgggagagtagctgagcttaatgatgtaacggctaaagtggcttctggccaggaaaaacatcttctctttgaggtacaacctgggtctgattcctctgctttttggaaagtggttgtacgggtggtctgtaccaagattaacaaaagcagtggcattgtggaggcatcacggatcatgaatttataccagtttattcaactttataaagatatcacaagtcaagcagcaggagtattggcacagagctccacctctgaagaacctgatgaaaactcatcctctgtaacatcttgtcaggctagtctttggatgggaagggtgaagcagctgaccgatgaggaggagtgttgtatctgtatggatgggcgggctgacctcatcctgccttgtgctcacagcttttgtcagaagtgtattgataaatggagtgatcgacacaggaattgccctatttgtcgcctacagatgactggagcaaatgaatcttgggtggtatcagatgcacccactgaagatgatatggctaactatattcttaacatggctgatgaggcaggccagccccacaggccatga

SEQ ID NO: 490 - DNA, 1077 bp, Homo sapiens;
atggctggctgtggtgaaattgatcattcaataaacatgcttcctacaaacaggaaagcgaacgagtcctgttctaatactgcaccttctttaaccgtccctgaatgtgccatttgtctgcaaacatgtgttcatccagtcagtctgccctgtaagcacgttttctgctatctatgtgtaaaaggagcttcatggcttggaaagcggtgtgctctttgtcgacaagaaattcccgaggatttccttgacaagccaaccttgttgtcaccagaagaactcaaggcagcaagtagaggaaatggtgaatatgcatggtattatgaaggaagaaatgggtggtggcagtacgatgagcgcactagtagagagctggaagatgctttttccaaaggtaaaaagaacactgaaatgttaattgctggctttctgtatgtcgctgatcttgaaaacatggttcaatataggagaaatgaacatggacgtcgcaggaagattaagcgagatataatagatataccaaagaagggagtagctggacttaggctagactgtgatgctaataccgtaaacctagcaagagagagctctgctgacggagcggacagtgtatcagcacagagtggagcttctgttcagcccctagtgtcttctgtaaggcccctaacatcagtagatggtcagttaacaagccctgcaacaccatcccctgatgcaagcacttctctggaagactcttttgctcatttacaactcagtggagacaacacagctgaaaggagtcataggggagaaggagaagaagatcatgaatcaccatcttcaggcagggtaccagcaccagacacctccattgaagaaactgaatcagatgccagtagtgatagtgaggatgtatctgcagttgttgcacagcactccttgacccaacagagacttttggtttctaatgcaaaccagacagtacccgatcgatcagatcgatcgggaactgatcgatcagtagcagggggtggaacagtgagtgtcagtgtcagatctagaaggcctgatggacagtgcacagtaactgaagtttaa

SEQ ID NO: 491 - DNA, 2199 bp, Homo sapiens;
atgggctccgagaaggactccgagtcgccgcgctccacatcgctacatgcggccgcacccgaccctaagtgccgcagcggcggccggcgccggcgcctcaccttgcacagcgtcttctctgcctcggcccgcggccgccgcgcccgggccaagccgcaggccgagccgccgcccccggctgcgcagccgccgcccgccccggcccctgccgcggcccagggcccgccgcccgaggcgctgcccgccgagccggccgccgaggccgaggcggaggccgcggcggcggcggcggagcctgggttcgacgatgaggaggcggcggagggcggtggcccgggcgcggaggaggtggagtgtccgctgtgcctggtgcggctgccgcctgagcgggccccgcgcctcctcagctgtccgcaccgctcgtgccgggactgcctccgccactacctgcgcctggagataagcgagagcagggtgcccatcagctgccccgagtgcagcgagcgactcaacccgcacgacatccgcttgctgctcgccgacccgccgcttatgcacaagtacgaggagttcatgctgcgccgctacctagcctcggaccccgactgccgctggtgcccggccccggactgcggttatgctgttattgcctatggctgtgccagctgcccgaagctaacttgtgagagggaaggttgccagactgagttctgctaccactgcaagcagatatggcatccaaatcagacatgcgatatggcccgtcaacagagggcccagactttacgagttcggaccaaacacacttcaggtctcagttatgggcaagaatctggaccagcagatgacatcaagccatgcccacgatgcagtgcatacattatcaagatgaatgatggaagctgtaatcacatgacctgtgcagtgtgtggctgtgaattctgttggctttgtatgaaagagatctcagacttgcattacctcagcccctctggctgtacattctggggcaagaagccatggagccgtaagaagaaaattctttggcagctgggcacgttgattggtgctccagtggggatttctctcattgctggcattgccattcctgccatggtcattggcattcctgtttatgttggaaggaagattcacagcaggtatgagggaaggaaaacctccaaacacaagaggaatttggctatcactggaggagtgactttgtcggtcattgcatccccagttattgctgcagttagtgttggtattggtgtccccattatgctggcatatgtttatggggttgtgcccatttctctttgtcgtggaggcggctgtggagttagcacagccaacggaaaaggagtgaaaattgaatttgatgaagatgatggtccaatcacagtggcagatgcctggagagccctcaagaatcccagcattggggaaagcagcattgaaggcctgactagtgtattgagcactagtggaagccctacagatggacttagtgttatgcaaggtccttacagcgaaacggccagctttgcagccctctcagggggcacgctgagtggcggcattctctccagtggcaagggaaaatatagcaggttagaagttcaagccgatgtccaaaaggaaattttccccaaagacacagccagtcttggtgcaattagtgacaacgcaagcactcgtgctatggccggttccataatcagttcctacaacccacaggacagagaatgcaacaatatggaaatccaagtggacattgaagccaaaccaagccactatcagctggtgagtggaagcagcacggaggactcgctccatgttcatgctcagatggcagagaatgaagaagaaggtagtggtggcggaggcagtgaagaggatcccccctgcagacaccaaagctgtgaacagaaagactgcctggccagcaaaccttgggacatcagcctggcccagcctgaaagcatccgcagtgacctagagagttctgatgcacagtcagacgatgtgccagacatcacctcagatgagtgtggctccccccgctcccatactgcagcctgcccctcgacccccagagcccaaggtgcaccgagcccaagtgcccatatgaacctctctgccctagccgagggacaaactgtcttgaagccagaaggtggagaagccagagtatga

SEQ ID NO: 492 - DNA, 654 bp, Homo sapiens;
atgagcagcaaagtctctcgcgacaccctgtacgaggcggtgcgggaagtcctgcacgggaaccagcgcaagcgccgcaagttcctggagacggtggagttgcagatcagcttgaagaactatgatccccagaaggacaagcgcttctcgggcaccgtcaggcttaagtccactccccgccctaagttctctgtgtgtgtcctgggggaccagcagcactgtgacgaggctaaggccgtggatatcccccacatggacatcgaggcgctgaaaaaactcaacaagaataaaaaactggtcaagaagctggccaagaagtatgatgcgtttttggcctcagagtctctgatcaagcagattccacgaatcctcggcccaggtttaaataaggcaggaaagttcccttccctgctcacacacaacgaaaacatggtggccaaagtggatgaggtgaagtccacaatcaagttccaaatgaagaaggtgttatgtctggctgtagctgttggtcacgtgaagatgacagacgatgagcttgtgtataacattcacctggctgtcaacttcttggtgtcattgctcaagaaaaactggcagaatgtccgggccttatatatcaagagcaccatgggcaagccccagcgcctatattaa

SEQ ID NO: 493 - DNA, 387 bp, Homo sapiens;
atggctcctgtgaaaaagcttgtggtgaaggggggcaaaaaaaagaagcaagttctgaagttcactcttgattgcacccaccctgtagaagatggaatcatggatgctgccaattttgagcagtttttgcaagaaaggatcaaagtgaacggaaaagctgggaaccttggtggaggggtggtgaccatcgaaaggagcaagagcaagatcaccgtgacatccgaggtgcctttctccaaaaggtatttgaaatatctcaccaaaaaatatttgaagaagaataatctacgtgactggttgcgcgtagttgctaacagcaaagagagttacgaattacgttacttccagattaaccaggacgaagaagaggaggaagacgaggattaa

SEQ ID NO: 494 - DNA, 2208 bp, Homo sapiens;
atgccgctcgcccagctcaaggagccctggccgctcatggagctagtgcctctggacccggagaatggacagacctcaggggaagaagctggacttcagccgtccaaggatgagggcgtcctcaaggagatctccatcacgcaccacgtcaaggctggctctgagaaggctgatccatcccatttcgagctcctcaaggttctgggccagggatcctttggcaaagtcttcctggtgcggaaagtcacccggcctgacagtgggcacctgtatgctatgaaggtgctgaagaaggcaacgctgaaagtacgtgaccgcgtccggaccaagatggagagagacatcctggctgatgtaaatcacccattcgtggtgaagctgcactatgccttccagaccgagggcaagctctatctcattctggacttcctgcgtggtggggacctcttcacccggctctcaaaagaggtgatgttcacggaggaggatgtgaagttttacctggctgagctggctctgggcctggatcacctgcacagcctgggtatcatttacagagacctcaagcctgagaacatccttctggatgaggagggccacatcaaactcactgactttggcctgagcaaagaggccattgaccacgagaagaaggcctattctttctgcgggacagtggagtacatggcccctgaggtcgtcaaccgccagggccactcccatagtgcggactggtggtcctatggggtgttgatgtttgagatgctgacgggctccctgcccttccaggggaaggaccggaaggagaccatgacactgattctgaaggcgaagctaggcatgccccagtttctgagcactgaagcccagagcctcttgcgggccctgttcaagcggaatcctgccaaccggctcggctccggccctgatggggcagaggaaatcaagcggcatgtcttctactccaccattgactggaataagctataccgtcgtgagatcaagccacccttcaagccagcagtggctcagcctgatgacaccttctactttgacaccgagttcacgtcccgcacacccaaggattccccaggcatcccccccagcgctggggcccatcagctgttccggggcttcagcttcgtggccaccggcctgatggaagacgacggcaagcctcgtgccccgcaggcacccctgcactcggtggtacagcaactccatgggaagaacctggtttttagtgacggctacgtggtaaaggagacaattggtgtgggctcctactctgagtgcaagcgctgtgtccacaaggccaccaacatggagtatgctgtcaaggtcattgataagagcaagcgggatccttcagaagagattgagattcttctgcggtatggccagcaccccaacatcatcactctgaaagatgtgtatgatgatggcaaacacgtgtacctggtgacagagctgatgcggggtggggagctgctggacaagatcctgcggcagaagttcttctcagagcgggaggccagctttgtcctgcacaccattggcaaaactgtggagtatctgcactcacagggggttgtgcacagggacctgaagcccagcaacatcctgtatgtggacgagtccgggaatcccgagtgcctgcgcatctgtgactttggttttgccaaacagctgcgggctgagaatgggctcctcatgacaccttgctacacagccaactttgtggcgcctgaggtgctgaagcgccagggctacgatgaaggctgcgacatctggagcctgggcattctgctgtacaccatgctggcaggatatactccatttgccaacggtcccagtgacacaccagaggaaatcctaacccggatcggcagtgggaagtttaccctcagtgggggaaattggaacacagtttcagagacagccaaggacctggtgtccaagatgctacacgtggatccccaccagcgcctcacagctaagcaggttctgcagcatccatgggtcacccagaaagacaagcttccccaaagccagctgtcccaccaggacctacagcttgtgaagggagccatggctgccacgtactccgcactcaacagctccaagcccaccccccagctgaagcccatcgagtcatccatcctggcccagcggcgagtgaggaagttgccatccaccaccctgtga

SEQ ID NO: 495 - DNA, 2223 bp, Homo sapiens;
atgccgctggcgcagctggcggacccgtggcagaagatggctgtggagagcccgtccgacagcgctgagaatggacagcaaattatggatgaacctatgggagaggaggagattaacccacaaactgaagaagtcagtatcaaagaaattgcaatcacacatcatgtaaaggaaggacatgaaaaggcagatccttcccagtttgaacttttaaaagtattagggcagggatcatttggaaaggttttcttagttaaaaaaatctcaggctctgatgctaggcagctttatgccatgaaggtattgaagaaggccacactgaaagttcgagaccgagttcggacaaaaatggaacgtgatatcttggtagaggttaatcatccttttattgtcaagttgcattatgcttttcaaactgaagggaagttgtatcttattttggattttctcaggggaggagatttgtttacacgcttatccaaagaggtgatgttcacagaagaagatgtcaaattctacttggctgaacttgcacttgctttagaccatctacatagcctgggaataatttatagagacttaaaaccagaaaatatacttcttgatgaagaaggtcacatcaagttaacagatttcggcctaagtaaagagtctattgaccatgaaaagaaggcatattctttttgtggaactgtggagtatatggctccagaagtagttaatcgtcgaggtcatactcagagtgctgactggtggtcttttggtgtgttaatgtttgaaatgcttactggtacactccctttccaaggaaaagatcgaaaagaaacaatgactatgattcttaaagccaaacttggaatgccacagtttttgagtcctgaagcgcagagtcttttacgaatgcttttcaagcgaaatcctgcaaacagattaggtgcaggaccagatggagttgaagaaattaaaagacattcatttttctcaacgatagactggaataaactgtatagaagagaaattcatccgccatttaaacctgcaacgggcaggcctgaagatacattctattttgatcctgagtttactgcaaaaactcccaaagattcacctggcattccacctagtgctaatgcacatcagctttttcgggggtttagttttgttgctattacctcagatgatgaaagccaagctatgcagacagttggtgtacattcaattgttcagcagttacacaggaacagtattcagtttactgatggatatgaagtaaaagaagatattggagttggctcctactctgtttgcaagagatgtatacataaagctacaaacatggagtttgcagtgaagattattgataaaagcaagagagacccaacagaagaaattgaaattcttcttcgttatggacagcatccaaacattatcactctaaaggatgtatatgatgatggaaagtatgtgtatgtagtaacagaacttatgaaaggaggtgaattgctggataaaattcttagacaaaaatttttctctgaacgagaggccagtgctgtcctgttcactataactaaaaccgttgaatatcttcacgcacaaggggtggttcatagagacttgaaacctagcaacattctttatgtggatgaatctggtaatccggaatctattcgaatttgtgattttggctttgcaaaacagctgagagcggaaaatggtcttctcatgactccttgttacactgcaaattttgttgcaccagaggttttaaaaagacaaggctatgatgctgcttgtgatatatggagtcttggtgtcctactctatacaatgcttaccggttacactccatttgcaaatggtcctgatgatacaccagaggaaatattggcacgaataggtagcggaaaattctcactcagtggtggttactggaattctgtttcagacacagcaaaggacctggtgtcaaagatgcttcatgtagaccctcatcagagactgactgctgctcttgtgctcagacatccttggatcgtccactgggaccaactgccacaataccaactaaacagacaggatgcaccacatctagtaaagggtgccatggcagctacatattctgctttgaaccgtaatcagtcaccagttttggaaccagtaggccgctctactcttgctcagcggagaggtattaaaaaaatcacctcaacagccctgtga

SEQ ID NO: 496 - DNA, 1086 bp, Homo sapiens;
atgtgggtgcttacacctgctgcttttgctgggaagctcttgagtgtgttcaggcaacctctgagctctctgtggaggagcctggtcccgctgttctgctggctgagggcaaccttctggctgctagctaccaagaggagaaagcagcagctggtcctgagagggccagatgagaccaaagaggaggaagaggaccctcctctgcccaccaccccaaccagcgtcaactatcacttcactcgccagtgcaactacaaatgcggcttctgtttccacacagccaaaacatcctttgtgctgccccttgaggaagcaaagagaggattgcttttgcttaaggaagctggtatggagaagatcaacttttcaggtggagagccatttcttcaagaccggggagaatacctgggcaagttggtgaggttctgcaaagtagagttgcggctgcccagcgtgagcatcgtgagcaatggaagcctgatccgggagaggtggttccagaattatggtgagtatttggacattctcgctatctcctgtgacagctttgacgaggaagtcaatgtccttattggccgtggccaaggaaagaagaaccatgtggaaaaccttcaaaagctgaggaggtggtgtagggattatagagtcgctttcaagataaattctgtcattaatcgtttcaacgtggaagaggacatgacggaacagatcaaagcactaaaccctgtccgctggaaagtgttccagtgcctcttaattgagggtgagaattgtggagaagatgctctaagagaagcagaaagatttgttattggtgatgaagaatttgaaagattcttggagcgccacaaagaagtgtcctgcttggtgcctgaatctaaccagaagatgaaagactcctaccttattctggatgaatatatgcgctttctgaactgtagaaagggacggaaggacccttccaagtccatcctggatgttggtgtagaagaagctataaaattcagtggatttgatgaaaagatgtttctgaagcgaggaggaaaatacatatggagtaaggctgatctgaagctggattggtag

SEQ ID NO: 497 - DNA, 711 bp, Homo sapiens;
atggcggagccgtcggcggccactcagtcccattccatctcctcgtcgtccttcggagccgagccgtccgcgcccggcggcggcgggagcccaggagcctgccccgccctggggacgaagagctgcagctcctcctgtgcggtgcacgatctgattttctggagagatgtgaagaagactgggtttgtctttggcaccacgctgatcatgctgctttccctggcagctttcagtgtcatcagtgtggtttcttacctcatcctggctcttctctctgtcaccatcagcttcaggatctacaagtccgtcatccaagctgtacagaagtcagaagaaggccatccattcaaagcctacctggacgtagacattactctgtcctcagaagctttccataattacatgaatgctgccatggtgcacatcaacagggccctgaaactcattattcgtctctttctggtagaagatctggttgactccttgaagctggctgtcttcatgtggctgatgacctatgttggtgctgtttttaacggaatcacccttctaattcttgctgaactgctcattttcagtgtcccgattgtctatgagaagtacaagacccagattgatcactatgttggcatcgcccgagatcagaccaagtcaattgttgaaaagatccaagcaaaactccctggaatcgccaaaaaaaaggcagaataa

SEQ ID NO: 498 - DNA, 741 bp, Homo sapiens;
atggttgtagatttctggacttgggagcagacatttcaagaactaatccaagaggcaaaaccccgggccacatggacgctgaagttggatggcaaccttcagctagactgcctggctcaagggtggaagcaataccaacagagagcatttggctggttccggtgttcctcctgccagcgaagttgggcttccgcccaagtgcagattctgtgccacacgtactgggagcactggacatcccagggtcaggtgcgtatgaggctctttggccaaaggtgccagaagtgctcctggtcccaatatgagatgcctgagttctcctcggatagcaccatgaggattctgagcaacctggtgcagcatatactgaagaaatactatggaaatggcacgaggaagtctccagaaatgccagtaatcctggaagtgtccctggaaggatcccatgacacagccaattgtgaggcatgcactttgggcatctgtggacagggcttaaaaagctgcatgacaaagccgtccaaatccctactcccccacctaaagactgggaattcctcacctggaattggtgctgtgtacctcgcaaaccaagccaagaaccagtcagctgaggcaaaagaggctaaggggagtgggtatgagaaattagggcccagtcgagacccagatccactgaacatctgtgtctttattttgctgcttgtatttattgtagtcaaatgctttacatcagaatga

SEQ ID NO: 499 - DNA, 1389 bp, Homo sapiens;
atggacaccaaacatttcctgccgctcgatttctccacccaggtgaactcctccctcacctccccgacggggcgaggctccatggctgccccctcgctgcacccgtccctggggcctggcatcggctccccgggacagctgcattctcccatcagcaccctgagctcccccatcaacggcatgggcccgcctttctcggtcatcagctcccccatgggcccccactccatgtcggtgcccaccacacccaccctgggcttcagcactggcagcccccagctcagctcacctatgaaccccgtcagcagcagcgaggacatcaagccccccctgggcctcaatggcgtcctcaaggtccccgcccacccctcaggaaacatggcttccttcaccaagcacatctgcgccatctgcggggaccgctcctcaggcaagcactatggagtgtacagctgcgaggggtgcaagggcttcttcaagcggacggtgcgcaaggacctgacctacacctgccgcgacaacaaggactgcctgattgacaagcggcagcggaaccggtgccagtactgccgctaccagaagtgcctggccatgggcatgaagcgggaagccgtgcaggaggagcggcagcgtggcaaggaccggaacgagaatgaggtggagtcgaccagcagcgccaacgaggacatgccggtggagaggatcctggaggctgagctggccgtggagcccaagaccgagacctacgtggaggcaaacatggggctgaaccccagctcgccgaacgaccctgtcaccaacatttgccaagcagccgacaaacagcttttcaccctggtggagtgggccaagcggatcccacacttctcagagctgcccctggacgaccaggtcatcctgctgcgggcaggctggaatgagctgctcatcgcctccttctcccaccgctccatcgccgtgaaggacgggatcctcctggccaccgggctgcacgtccaccggaacagcgcccacagcgcaggggtgggcgccatctttgacagggtgctgacggagcttgtgtccaagatgcgggacatgcagatggacaagacggagctgggctgcctgcgcgccatcgtcctctttaaccctgactccaaggggctctcgaacccggccgaggtggaggcgctgagggagaaggtctatgcgtccttggaggcctactgcaagcacaagtacccagagcagccgggaaggttcgctaagctcttgctccgcctgccggctctgcgctccatcgggctcaaatgcctggaacatctcttcttcttcaagctcatcggggacacacccattgacaccttccttatggagatgctggaggcgccgcaccaaatgacttag

SEQ ID NO: 500 - DNA, 954 bp, Homo sapiens;
  misc_feature (1)..(2): n is a, c, g, or t
nngcttcctgcgcccgccgcggcccttcccggggcgccgccgccaccgcctggtgtgcgaggctatccggcccgggcccggggcttgcagggtgccagtgggggcgcccggttcccttcctcgctctctcttccagtccccggaaagggtgggtgggtggtctcccgagcgaagtttccagcactggattcctgcgaaattacgacggctcacccgcgtctgtgttttgctgtctctcccccgttttcctgctccctgcctcttccctcccttttcccccactctccactcctcggaaggccaaaaagacaagcgaaacctgccgcagacgaagggttttgggattgtagcgtctgcaccttcagaaacagtgctgaagcctttaaatgcagcatctgcgatgtgaggaaaggcacctccaccagaaaacctcggatcaattctcagctggtggcacaacaagtggcacaacagtatgccaccccaccaccccctaaaaaggagaagaaggagaaagttgaaaagcaggacaaagagaaacctgagaaagacaaggaaattagtcctagtgttaccaagaaaaataccaacaagaaaaccaaaccaaagtctgacattctgaaagatcctcctagtgaagcaaacagcatacagtctgcaaatgctacaacaaagaccagcgaaacaaatcacacctcaaggccccggctgaaaaacgtggacaggagcactgcacagcagttggcagtaactgtgggcaacgtcaccgtcattatcacagactttaaggaaaagactcgctcctcatcgacatcctcatccacagtgacctccagtgcagggtcagaacagcagaaccagagcagctcggggtcagagagcacagacaagggctcctcccgttcctccacgccaaagggcgacatgtcagcagtcaatgatgaatctttctga

SEQ ID NO: 501 - DNA, 2862 bp, Homo sapiens;
atggcggagactctgcccgggtcgggcgactcgggccctggcacggcttctctcggcccgggcgttgcggagactgggacgaggcggctcagcgagctgcgggtgatcgatctgcgggcggagctgaagaagcggaacctggacacgggcggcaacaagagcgtcctgatggagcggctcaagaaggcggttaaagaagaggggcaagatcctgatgaaattggcatcgagttagaagccaccagcaagaagtcagccaagagatgtgttaaaggactgaagatggaggaggaaggcacagaagataatggcctggaagacgattccagagacgggcaggaggacatggaagcaagtctggagaacctgcagaatatgggcatgatggacatgagtgtgctagacgaaactgaagtggcgaatagcagtgctccagattttggggaggatggcacggacggccttctcgattccttttgtgatagtaaagaatacgtggctgcacagctgagacagctcccggctcagcccccagagcatgctgtggatggggaaggatttaagaacactttggaaacttcatcgttgaacttcaaagtaactccggacattgaagaatcccttttggagccagaaaatgagaaaatactcgacattttgggggaaacttgtaaatctgagccagtaaaagaagaaagttccgagctggagcagccatttgcacaggacacaagtagcgtggggccagacagaaagcttgcggaggaagaggacctatttgacagcgcccatccggaagagggtgatttagatttggccagcgagtcaacagcacacgctcagtcgagcaaggcagacagcctgttagcggtagtgaaaagggagcccgcggagcagccaggcgatggcgagaggacggactgtgagcctgtagggctagagccggcagttgagcagagtagtgcggcctccgagctcgcggaggcctctagcgaggagctcgcagaagcacccacggaagccccaagcccagaagccagagatagcaaagaagacgggaggaagtttgattttgacgcttgtaatgaagtccctccggctcctaaagagtcctcaaccagtgagggcgctgatcagaaaatgagctcttttaaggaagaaaaagatataaagccaatcattaaagatgaaaaaggtcgggtcggcagcggttctggtcggaacctgtgggtcagcgggctgtcctccacaacacgcgctacggatctcaagaaccttttcagcaagtatgggaaggttgtcggggccaaagtggtaacgaacgcccgcagcccgggggctcgatgctatggattcgtcaccatgtcgacatctgacgaggcgaccaagtgcatcagccatctccacagaactgagctgcatggacgaatgatctccgtagagaaggccaaaaatgagcctgctgggaaaaagctttccgacagaaaagagtgcgaagtgaagaaggaaaaattatcgagtgtcgacagacatcattctgtggagatcaaaattgaaaaaactgtaattaagaaggaagagaagattgagaagaaggaggaaaaaaagcctgaagacattaagaaggaagaaaaagaccaggatgagctgaaacccggacctacaaatcggtctagagtcaccaaatcaggaagcagaggaatggagcggacggtcgtgatggataaatcgaaaggagagcccgtcattagcgtgaaaaccacaagcaggtccaaagagagaagctccaagagtcaggatcgcaagtcagaaagcaaagaaaagagagacatcttgtcgtttgataaaatcaaagaacaaagggagagagagcgccagaggcagcgggaacgggagatccgcgaaacggagaggcggcgggagcgcgagcagcgggagcgggagcaacgcctcgaggccttccatgagcggaaggagaaggcccggctacagcgggaacgcctgcagctcgagtgccagcgccagcggctggagcgggagcgcatggagcgggagcggctggagcgcgagcgcatgcgcgtggagcgtgagcgcaggaaggagcaggagcgcatccaccgcgagcgcgaggagctgcggcgccagcaggagcagctgcgttacgagcaggagcggcggcccgggcggaggccctacgacctggaccgacgagatgatgcctattggccagaaggaaagcgtgtggcaatggaggaccgatatcgtgcagactttccccggccagaccaccgctttcacgacttcgatcatcgagaccggggccagtaccaggaccacgccatcgacaggcgggagggttcgaggccaatgatgggagaccaccgggatgggcagcactatggagatgaccgccatggccacggaggacccccagagcgccacggccgggactcccgtgatggctgggggggctacggctccgacaagaggctgagtgaaggccgggggctgccccctccccccaggggtggccgtgactggggagagcacaaccagcggctagaggagcaccaggcacgcgcctggcagggtgccatggacgcaggcgcggctagccgggagcacgccaggtggcaaggtggcgagaggggcctgtctgggccctcggggccggggcacatggcaagccgcggtggagtggcggggcgaggcggctttgcacaaggtggacattcccagggccacgtggtgccaggtggcggactggaaggtggcggagtggccagccaggaccggggcagcagagtccctcacccacaccctcatccccccccgtacccccacttcacccgccgctactaa

SEQ ID NO: 502 - DNA, 2292 bp, Homo sapiens;
atggatcatttgaacgaggcaactcaggggaaagaacattcagaaatgtctaacaatgtgagtgatccgaagggtccaccagccaagattgcccgcctggagcagaacgggagcccgctaggaagaggaaggcttgggagtacaggtgcaaaaatgcagggagtgcctttaaaacactcgggccatctgatgaaaaccaaccttaggaaaggaaccatgctgccagttttctgtgtggtggaacattatgaaaacgccattgaatatgattgcaaggaggagcatgcagaatttgtgctggtgagaaaggatatgcttttcaaccagctgatcgaaatggcattgctgtctctaggttattcacatagctctgctgcccaggccaaagggctaatccaggttggaaagtggaatccagttccactgtcttacgtgacagatgcccctgatgctacagtagcagatatgcttcaagatgtgtatcatgtggtcacattgaaaattcagttacacagttgccccaaactagaagacttgcctcccgaacaatggtcgcacaccacagtgaggaatgctctgaaggacttactgaaagatatgaatcagagttcattggccaaggagtgccccctttcacagagtatgatttcttccattgtgaacagtacttactatgcaaatgtctcagcagcaaaatgtcaagaatttggaaggtggtacaaacatttcaagaagacaaaagatatgatggttgaaatggatagtctttctgagctatcccagcaaggcgccaatcatgtcaattttggccagcaaccagttccagggaacacagccgagcagcctccatcccctgcgcagctctcccatggcagccagccctctgtccggacacctcttccaaacctgcaccctgggctcgtatcaacacctatcagtcctcaattggtcaaccagcagctggtgatggctcagctgctgaaccagcagtatgcagtgaatagacttttagcccagcagtccttaaaccaacaatacttgaaccaccctccccctgtcagtagatctatgaataagcctttggagcaacaggtttcgaccaacacagaggtgtcttccgaaatctaccagtgggtacgcgatgaactgaaacgagcaggaatctcccaggcggtatttgcacgtgtggcttttaacagaactcagggcttgctttcagaaatcctccgaaaggaagaggaccccaagactgcatcccagtctttgctggtaaaccttcgggctatgcagaatttcttgcagttaccggaagctgaaagagaccgaatataccaggacgaaagggaaaggagcttgaatgctgcctcggccatgggtcctgcccccctcatcagcacaccacccagccgtcctccccaggtgaaaacagctactattgccactgaaaggaatgggaaaccagagaacaataccatgaacattaatgcttccatttatgatgagattcagcaggaaatgaagcgtgctaaagtgtctcaagcactgtttgcaaaggttgcagcaaccaaaagccagggatggttgtgcgagctgttacgctggaaagaagatccttctccagaaaacagaaccctgtgggagaacctctccatgatccgaaggttcctcagtcttcctcagccagaacgtgatgccatttatgaacaggagagcaacgcggtgcatcaccatggcgacaggccgccccacattatccatgttccagcagagcagattcagcaacagcagcagcaacagcaacagcagcagcagcagcagcaggcaccgccgcctccacagccacagcagcagccacagacaggccctcggctccccccacggcaacccacggtggcctctccagcagagtcagatgaggaaaaccgacagaagacccggccacgaacaaaaatttcagtggaagccttgggaatcctccagagtttcatacaagacgtgggcctgtaccctgacgaagaggccatccagactctgtctgcccagctcgaccttcccaagtacaccatcatcaagttctttcagaaccagcggtactatctcaagcaccacggcaaactgaaggacaattccggtttagaggtcgatgtggcagaatataaagaagaggagctgctgaaggatttggaagagagtgtccaagataaaaatactaacacccttttttcagtgaaactagaagaagagctgtcagtggaaggaaacacagacattaatactgatttgaaagactga

SEQ ID NO: 503 - DNA, 1200 bp, Homo sapiens;
atggcggaacgcaggagacacaagaagcggatccaggaagttggtgaaccatctaaagaagagaaggctgtggccaagtatcttcgattcaactgtccaacaaagtccaccaatatgatgggtcaccgggttgattattttattgcttcaaaagcagtggactgtcttttggattcaaagtgggcaaaggccaagaaaggagaggaagctttatttacaaccagggagtctgtggttgactactgcaacaggcttttaaagaagcagttttttcaccgagccctaaaagtaatgaaaatgaaatatgataaagacataaagaaagaaaaagataaaggaaaagctgaaagtggaaaagaagaagataaaaagagcaagaaagaaaatataaaggatgagaagacaaaaaaagaaaaagagaaaaaaaaagatggtgaaaaggaagaatccaaaaaggaggaaactccaggaactcctaaaaagaaggaaactaagaaaaaattcaaacttgagccacatgatgatcaggtttttctggatggaaatgaggtgtatgtatggatctatgacccagttcactttaaaacatttgtcatgggattaattcttgtgattgcagtaatagcggccaccctcttccccctttggccagcagaaatgagagtaggtgtttattacctcagtgtgggtgcaggctgttttgtagccagtattcttctccttgctgttgctcgatgcattctatttctcatcatttggctcataactggaggaaggcaccacttttggttcttgccaaatctgactgctgatgtgggcttcattgactccttcaggcctctgtacacacatgaatacaaaggaccaaaagcagacttaaagaaagatgagaagtctgaaaccaaaaagcaacagaagtccgacagtgaggaaaagtcagacagtgagaaaaaggaagatgaggaggggaaagtaggaccaggaaatcatggaacagaaggctcggggggagaacggcattcagacacggacagtgacaggagggaagatgatcgatcccagcacagtagtggaaatggaaatgattttgaaatgataacaaaagaggaactggaacagcaaacagatggggattgtgaagaggatgaggaagaggaaaatgatggagaaacacctaaatcttcacatgaaaaatcataa

SEQ ID NO: 504 - DNA, 2589 bp, Homo sapiens;; identical to SEQ ID NO: 80

SEQ ID NO: 505 - DNA, 1422 bp, Homo sapiens;
atgggggctgtgctgggtgtcttctccctcgccagctgggttccatgcctctgcagcggtgcctcatgtttgctgtgtagttgctgtcctaacagtaagaattccacggtgactcgcctcatttatgctttcattctcctcctgagcactgtcgtatcctatatcatgcagagaaaagagatggaaacttacttgaagaagattcctggattttgtgaagggggatttaaaatccatgaggctgatataaatgcagataaagattgtgatgtgctggttggttataaagctgtgtatcggatcagctttgccatggccatctttttctttgtcttttctctgctcatgttcaaagtaaaaacaagtaaagatctccgagcggcagtacacaatgggttttggttcttcaaaattgctgcccttattggaatcatggttggctctttctacatccctgggggctatttcagctcagtctggtttgttgttggcatgataggggccgccctcttcatcctcattcagctggtgctgctggtagattttgctcattcttggaatgaatcatgggtaaatcgaatggaagaaggaaacccaaggttgtggtatgctgctttactgtctttcacaagcgccttttatatcctgtcaatcatctgtgtcgggctgctctatacatattacaccaaaccagatggctgcacagaaaacaagttcttcatcagtattaacctgatcctttgcgttgtggcttctattatatcgatccacccaaaaattcaggaacaccagcctcgctccggcctcttgcagtcctccctcatcaccctctacactatgtacctcacctggtcagccatgtccaatgaacctgatcgttcctgcaatcccaacctgatgagctttattacacgcataactgcaccaaccctggctcctggaaattcaactgctgtggtccctacccctactccaccatcaaagagtgggtctttactggattcagataattttattggactgtttgtctttgttctctgcctcttgtattctagcatccgcacttccactaatagccaagtagacaagctgaccctgtcagggagtgacagcgtcatccttggtgatacaactaccagtggtgccagtgatgaagaagatggacagcctcggcgggctgtggacaacgagaaagagggagtgcagtatagctactccttattccacctcatgctctgcttggcttccttgtacatcatgatgaccctgaccagctggtacagccctgatgcaaagtttcagagcatgaccagcaagtggccagctgtgtgggtcaagatcagctccagctgggtctgcctcctgctttacgtctggacccttgtggctccacttgtcctcaccagtcgggacttcagctga

SEQ ID NO: 506 - DNA, 1371 bp, Homo sapiens;
atgtcagctcagtgctgtgcgggccagctggcctgctgctgtgggtctgcaggctgctctctctgctgtgattgctgccccaggattcggcagtccctcagcacccgcttcatgtacgccctctacttcattctggtcgtcgtcctctgctgcatcatgatgtcaacaaccgtggctcacaagatgaaagagcacattcctttttttgaagatatgtgtaaaggcattaaagctggtgacacctgtgagaagctggtgggatattctgccgtgtatagagtctgttttggaatggcttgtttcttctttatcttctgtctactgaccttgaaaatcaacaacagcaaaagttgtagagctcatattcacaatggcttttggttctttaaacttctgctgttgggggccatgtgctcaggagctttcttcattccagatcaggacacctttctgaacgcctggcgctatgtgggagccgtcggaggcttcctcttcattggcatccagctcctcctgctcgtggagtttgcacataagtggaacaagaactggacagcaggcacagccagtaacaagctgtggtacgcctccctggccctggtgacgctcatcatgtattccattgccactggaggcttggttttgatggcagtgttttatacacagaaagacagctgcatggaaaacaaaattctgctgggagtaaatggaggcctgtgcctgcttatatcattggtagccatctcaccctgggtccaaaatcgacagccacactcggggctcttacaatcaggggtcataagctgctatgtcacctacctcaccttctcagctctgtccagcaaacctgcagaagtagatgaacatgggaaaaatgttacaatctgtgtgcctgactttggtcaagacctgtacagagatgaaaacttggtgactatactggggaccagcctcttaatcggatgtatcttgtattcatgtttgacatcaacaacaagatcgagttctgacgctctgcaggggcgatacgcagctcctgaattggagatagctcgctgttgtttttgcttcagtcctggtggagaggacactgaagagcagcagccggggaaggagggaccacgggtcatttatgacgagaagaaaggcaccgtctacatctactcctacttccacttcgtgttcttcctagcttccctgtatgtgatgatgaccgtcaccaactggttcaaatggagtcccactctgttgcccaggctggagtacagtggcatgatcttggctcactgcaacctccacctcccagatgtcaagcgattctcttgcctcagcctcccaagtagctggggttacaggcatgtgccaccatga

SEQ ID NO: 507 - DNA, 945 bp, Homo sapiens;
atgttgggtaaaggaggaaaacggaagtttgatgagcatgaagatgggctggaaggcaaaatcgtgtctccctgtgacggtccatccaaggtgtcttacaccttacagcgccagactatcttcaacatttcccttatgaaactctataaccacaggcccctgacagagcccagcttgcaaaagaccgttttaattaacaacatgttgaggcggatccaggaggaactcaaacaggaaggcagcctgaggcccatgttcaccccctcctcccagcccaccaccgagcccagcgacagctaccgagaggccccgccggccttcagccacctggcgtccccgtcctcccacccctgcgacctcggaagcactacgcccctggaggcctgcctcaccccggcctcactgctcgaggacgacgatgacacgttttgcacctcccaggccatgcagcccacggctcccaccaaactgtcacctccagccctcttgccagaaaaggacagtttctcctctgccttggacgagatcgaggagctctgtcccacatctacctccacagaggcggccacggctgcgactgacagtgtgaaagggacctccagcgaggctggcacccagaaactcgacggtcctcaagagagccgcgcagatgactcaaaactgatggactctctgcctgggaattttgaaataacgacgtccacgggtttcctgacagacttgaccctggatgacatcctgtttgctgacattgatacgtccatgtatgattttgacccctgcacttcctcatcagggacagcctcaaaaatggcccctgtgtctgccgacgacctcctcaaaactctggctccttacagcagtcagcctgtcaccccaagtcagcctttcaaaatggacctcacagagctggaccacatcatggaggtgcttgttgggtcctaa

SEQ ID NO: 508 - DNA, 1656 bp, Homo sapiens;
atggctgaaggagagaatgaagtgagatgggatggactctgcagcagagattcaactactagggagacagcattggaaaacattaggcaaaccattttgaggaaaaccgagtatcttcgttcggtgaaagaaacacctcatcgtccatcagacgggctttcaaataccgagtcttcggatgggttgaataagctacttgctcatctgcttatgctttctaagaggtgtcccttcaaagatgtgagagagaaaagtgagtttattctgaagagcatccaggaacttggcattagaattcctcgaccactaggacagggaccaagcagattcatcccagaaaaggagatcctccaagtggggagtgaagacgcacagatgcatgctttatttgcagattcttttgctgctttgggccgtttggataacattacgttagtgatggttttccacccacaatatttagaaagtttcttaaaaactcagcactatctactgcaaatggatgggccgttacccctacattatcgtcactacattggaataatggctgcggcaagacatcagtgctcctacttagtgaacctgcatgtaaatgatttccttcatgttggtggggaccccaagtggctcaatggtttagagaatgctcctcaaaaactacagaatttaggagaacttaacaaagtgttagcccatagaccttggcttattaccaaagaacacattgagggacttttaaaagctgaagagcacagctggtcccttgcggaattggtacatgcagtagttttactcacacactatcattctcttgcctcattcacattcggctgtggaatcagtccagaaattcattgtgatggtggccacacattcagacctccttctgttagcaactactgcatctgtgacattacaaatggcaatcacagtgtggatgagatgccggtcaactcagcagaaaatgtttctgtaagtgattctttctttgaggttgaagccctcatggaaaagatgaggcagttacaggaatgtcgagatgaagaagaggcaagtcaggaagagatggcttcacgttttgaaatagaaaaaagagagagtatgtttgtcttctcttcagatgatgaagaagttacaccagcaagagctgtatctcgtcattttgaggatactagttatggctataaagatttctctagacatgggatgcatgttccaacatttcgtgtccaggactattgctgggaagatcatggttattctttggtaaatcgcctttatccagatgtgggacagttgattgatgaaaaatttcacattgcttacaatcttacttataatacaatggcaatgcacaaagatgttgatacctcaatgcttagacgggcaatttggaactatattcactgcatgtttggaataagatatgatgattatgactatggtgaaattaaccagctattggatcgtagctttaaagtttatatcaaaactgttgtttgcactcctgaaaaggttaccaaaagaatgtatgatagcttctggaggcagttcaagcactctgagaaggttcatgttaatctgcttcttatagaagctaggatgcaagcagaactcctttatgctctgagagccattacccgctatatgacctga

SEQ ID NO: 509 - DNA, 7695 bp, Homo sapiens;
atgaagcagctgcagccgcagccgcctccgaagatgggggatttctacgacccggagcacccgacccctgaagaagaagaaaatgaggcaaagattgaaaatgtgcagaaaacaggtttcatcaaaggaccaatgttcaaaggtgttgcttctagtcgatttttgcccaaaggcaccaaaacaaaagttaatttggaagaacagggacgacagaaggtgtcattcagcttcagccttacaaagaaaactttgcagaataggtttctcactgcacttggcaatgaaaagcaaagtgatactccaaaccctccagctgtacctcttcaggtagactcgactcctaaaatgaaaatggaaattggtgataccttatctactgcagaagaatcttccccaccaaagtcaagggtggaattgggcaaaattcattttaagaaacatctgcttcatgtaacatccaggccactgctggctactaccacagcagtagcatctccacctactcatgcagcaccattaccagcagtgatagcagaatcaacaactgtagactcaccgccctcatctccgcctccaccgcctccacctgcccaagccacaacactctcatcaccagcaccagtaacagagccagtggccttgccacatacaccaataacagttctaatggcagcaccagtacccttaccagtagatgtagcagttagatctctgaaagaaccaccaattataattgtaccagaatctttagaagcagatactaagcaggacactatatctaatagtttagaagaacacgtaactcaaatattgaatgagcaagcagatatttcctcaaaaaaagaagattcccatattgggaaggatgaagaaattccagatagttctaagattagtctgagctgtaaaaaaacaggttctaagaagaaatcctcacaatctgaaggcatctttcttggttcagaatctgatgaagattctgtacggacttcttcaagtcaaagatcacatgatttaaaattttcagcaagcattgaaaaggaaagagattttaaaaagagctcagcacctttaaaaagtgaggatctagggaaaccttcacgatctaaaacagacagagatgataaatattttagctattcaaaacttgaaagagatactcggtatgtatcttcccgatgtagatcagaaagagagcgacggcggagcagatctcactctaggtctgagagaggctctagaactaatttatcctattccaggtcagaacgatctcattattatgactctgatcgtcgctaccataggagctccccttatcgagagaggacgcgctattctcggccatacacagataacagagcacgagagagttctgactcagaagaagagtataagaagacatactcaaggcgtacctcatctcattcctcttcttacagagacctaaggacatcatcctattctaaatctgatcgggactgtaaaactgagacctcttacttagagatggaaagaagaggcaagtattcttcaaaactagaaagagaatctaaaaggacttcagaaaatgaagcaattaaaagatgttgttctccccctaatgaactgggattccgacgagggtcatcatattctaagcatgacagtagtgcttcccgttataaatctaccctttcaaaacctatacccaagtctgataaatttaaaaattctttctgttgtacagaattaaatgaagaaatcaaacagtctcattcttttagtttacagacaccttgttcaaaaggtagtgaattaagaatgattaataaaaatcctgaaagagaaaaggctgggtctccagctccatcaaatcgattaaatgattcacctactttaaaaaagctagatgaattgcctatttttaagtccgaatttataacacatgatagccatgatagtattaaggaattagactctttatctaaagtgaagaatgatcaattaagaagtttttgtcccatagaattaaatataaatggatctcctggggcagaatctgatttggcaacattttgcacttctaaaactgatgctgttttaatgacttctgatgatagtgtgactggatcggaattatcccctttggtcaaagcatgcatgctttcatcaaatggatttcagaatattagtaggtgcaaagaaaaagacttggatgatacctgcatgctgcataagaagtcagaaagcccatttagagaaacagaacctctggtgtcaccacaccaagataaactcatgtctatgccagttatgactgtggattattccaaaacagtagttaaagaaccagttgatacgagggtttcttgctgcaaaaccaaagattcagacatatactgtactttgaacgatagcaacccttctttgtgtaactctgaagctgaaaatattgagccttcagttatgaagatttcttcaaatagctttatgaatgtgcatttggaatcaaaaccagttatatgtgatagtagaaatttgacagatcactcaaaatttgcatgtgaagaatataagcagagcatcggtagcactagttcagcttctgttaatcattttgatgatttatatcaacctattgggagttcaggtattgcttcatctcttcagagtcttccaccaggaataaaggtggacagtctaactctcttgaaatgcggagagaacacatctccagttctggatgcagtgctaaagagtaaaaaaagttcagagtttttaaagcatgcagggaaagaaacaatagtagaagtaggtagtgaccttcctgattcaggaaagggatttgcttccagggagaacaggcgtaataatgggttatctgggaaatgtttgcaagaggctcaagaagaagggaattccatattgcctgaaagaagaggaagaccagaaatctctttagatgaaagaggagaaggaggacatgtgcatacttctgatgactcagaagttgtattttcttcttgtgatttgaatttaaccatggaagacagtgatggtgtaacttatgcattaaagtgtgacagtagtggtcatgccccagaaattgtgtctacagttcatgaagattattctggctcttctgaaagttcaaatgatgaaagtgattcagaagatacagattcggatgatagcagtattccaagaaaccgtctccagtctgttgtggttgtgccaaagaattctactttgcccatggaagaaacaagtccttgttcttctcggagcagtcaaagttatagacactattctgaccattgggaagatgagagattggagtcaaggagacatttgtatgaggaaaaatttgaaagtatagcaagtaaagcctgtcctcaaactgataagtttttccttcataaaggaacagagaagaatccggaaatttcttttacacagtccagtagaaaacaaatagataatcgcctgcctgaactttctcatcctcagagtgatggggttgatagtacaagtcatacagatgtgaaatctgaccctctgggtcacccaaattcagaggaaaccgtgaaagccaaaataccttctaggcagcaagaagagctgccaatttattcttctgattttgaagatgtcccaaataagtcttggcaacagaccactttccaaaacaggccagatagtagactgggaaaaacagaattgagtttttcttcctcttgtgagataccacatgtggatggcttgcactcatcagaagagctcagaaacttaggttgggacttctctcaagaaaagccttctaccacgtatcagcaacctgacagtagctatggagcttgtggtggacacaagtatcagcaaaatgcagaacagtatggtgggacacgtgattactggcaaggcaatggttactgggatccaagatcaggtagacctcctggaactggggttgtgtatgatcgaactcaaggacaagtaccagattccctaacagatgatcgtgaagaagaggagaattgggatcaacaggatggatcccatttttcagaccagtccgataaatttcttctatcccttcagaaagacaaggggtcagtgcaagcacctgaaataagcagcaattccattaaggacactttagctgtgaatgaaaagaaagatttttcaaaaaacttagaaaaaaatgatatcaaagatagagggcctcttaaaaaaaggaggcaggaaatagagagtgattctgaaagtgatggtgagcttcaggacagaaagaaagttagagtggaggtagagcagggagagacatcagtgcccccaggttcagcactggttgggccctcctgtgtcatggatgacttcagggacccacagcgatggaaggaatgtgccaagcaagggaaaatgccatgttactttgatcttattgaagaaaatgtttatttaacagaaagaaagaagaataaatctcatcgagatattaagcgaatgcagtgtgagtgtacacctctttctaaagatgaaagagctcaaggtgaaatagcatgtggggaagattgtcttaatcgtcttctcatgattgaatgttcttctcggtgtccaaatggggattattgttccaatagacggtttcagagaaaacagcatgcagatgtggaagtcatactcacagaaaagaaaggctggggcttgagagctgccaaagaccttccttcgaacacctttgtcctagaatattgtggagaggtactcgatcataaagagtttaaagctcgagtgaaggagtatgcacgaaacaaaaacatccattactatttcatggccctgaagaatgatgagataatagatgccactcaaaaaggaaattgctctcgtttcatgaatcacagctgtgaaccaaattgtgaaacccaaaaatggactgtgaacggacaactgagggttgggttttttaccaccaaactggttccttcaggctcagagttaacgtttgactatcagttccagagatatggaaaagaagcccagaaatgtttctgcggatcagccaattgccggggttacctgggaggagaaaacagagtcagcatcagagcagcaggagggaaaatgaagaaggaacgatctcgtaagaaggattcagtggatggagagctagaagctctgatggaaaatggtgagggtctctctgataaaaaccaggtgctcagcttatcccggctaatggttagaattgaaactttggagcagaaacttacctgtctggaactcatacagaacacacactcacagtcctgcctgaagtcctttctggaacgtcatgggctgtctttgttgtggatctggatggcagagctaggtgacggccgggaaagtaaccagaagcttcaggaagagattataaagactttggaacacttgcccattcctactaaaaatatgttggaggaaagcaaagtacttccaattattcaacgctggtctcagactaagactgctgtccctccgttgagtgaaggagatgggtattctagtgagaatacatcgcgtgctcatacaccactcaacacacctgatccttccaccaagctgagcacagaagctgacacagacactcccaagaaactaatgtttcgcagactgaaaattataagtgaaaatagcatggacagtgcaatctctgatgcaaccagtgagctagaaggcaaggatggcaaagaggatcttgatcaattagaaaatgtccctgtagaggaagaggaagaattgcagtcacaacagctactcccacaacagctgcctgaatgcaaagttgatagtgaaaccaacatagaagctagtaagctacctacatctgaaccagaagctgacgctgaaatagagcccaaagagagcaacggcacaaaactagaagaacctattaatgaagaaacaccatcccaagatgaagaggagggtgtgtctgatgtggagagtgaaaggagccaagaacagccagataaaacagtggatataagtgatttggccaccaaactcctggacagttggaaagacctaaaggaggtatatcgaattccaaagaaaagtcaaactgaaaaggaaaacacaacaactgaacgaggaagggatgctgttggcttcagagatcaaacacctgccccgaagactcctaataggtcaagagagagagacccagacaagcaaactcaaaataaagagaaaaggaaacgaagaagctccctctcaccaccctcttctgcctatgagcggggaacaaaaaggccagatgacagatatgatacaccaacttctaaaaagaaagtacgaattaaagaccgcaataaactttctacagaggaacgccggaagttgtttgagcaagaggtggctcaacgggaggctcagaaacaacagcaacagatgcagaacctgggaatgacatcaccactgccctatgactctcttggttataatgccccgcatcatccctttgctggttacccaccaggttatcccatgcaggcctatgtggatcccagcaaccctaatgctggaaaggtgctcctgcccacacccagcatggacccagtgtgttctcctgctccttatgatcatgctcagcccttggtgggacattctacagaacccctttctgcccctccaccagtaccagtggtgccacatgtggcagctcctgtggaagtttccagttcccagtatgtggcccagagtgatggtgtagtacaccaagactccagcgttgctgtcttgccagtgccggcccccggcccagttcagggacagaattatagtgtttgggattcaaaccaacagtctgtcagtgtacagcagcagtactctcctgcacagtctcaagcaaccatatattatcaaggacagacatgtccaacagtctatggtgtgacatcaccttattcacagacaactccaccaattgtacagagttatgcccagccaagtcttcagtatatccaggggcaacagattttcacagctcatccacaaggagtggtggtacagccagccgcagcagtgactacaatagttgcaccagggcagcctcagcccttgcagccatctgaaatggttgtgacaaataatctcttggatctgccgcccccctctcctcccaaaccaaaaaccattgtcttacctcccaactggaagacagctcgagatccagaagggaagatttattactaccatgtgatcacaaggcagactcagtgggatcctcctacttgggaaagcccaggagatgatgccagccttgagcatgaagctgagatggacctgggaactccaacatatgatgaaaaccccatgaaggcctcgaaaaagcccaagacagcagaagcagacacctccagtgaactagcaaagaaaagcaaagaagtattcagaaaagagatgtcccagttcatcgtccagtgcctgaacccttaccggaaacctgactgcaaagtgggaagaattaccacaactgaagactttaaacatctggctcgcaagctgactcacggtgttatgaataaggagctgaagtactgtaagaatcctgaggacctggagtgcaatgagaatgtgaaacacaaaaccaaggagtacattaagaagtacatgcagaagtttggggctgtttacaaacccaaagaggacactgaattagagtga

SEQ ID NO: 510 - DNA, 1728 bp, Homo sapiens;
atgaacgggcctgccctgcagccctcctcgccctcttccgcgccctcagcctccccggcggcggccccgcggggctggagcgagttctgtgagttgcacgccgtagcggcggcccgggagctggcccgccagtactggctgttcgcccgggagcatccgcagcacgcgccgctgcgcgccgagctggtgtcgctgcagttcaccgacctcttccagcgctacttctgccgcgaggtgcgcgacggacgggcgccgggccgcgactaccgggacacaggccgtgggcccccagccaaggccgaggcgtccccggagccaggccccggccccgccgcccctggcctgcccaaggcccgcagctctgaggagctggccccgccgcggccgcccgggccctgctccttccagcactttcgccgcagcctccgccacatcttccgccgccgctcggccggggagctgccagcggcccacaccgctgccgcccccgggacccccggagaggctgctgagacccccgcccggcctggcctggccaagaagttcctgccctggagcctggcccgggagccgccacccgaggcgctgaaggaggcggtgctgcgctacagcctggccgacgaggcctccatggacagcggggcacgctggcagcgcgggaggctggcgctgcgccgggccccgggccccgatggccccgaccgcgtgctggagctcttcgacccacccaagagttcaaggcccaagctacaagcagcttgctccagcatccaggaggtccggtggtgcacacggcttgagatgcctgacaacctttacacctttgtgctgaaggtgaaggaccggacagacatcatctttgaggtgggagacgagcagcagctgaattcatggatggctgagctctcggagtgcacaggccgagggctggagagcacagaagcagagatgcatattccctcagccctagagcctagcacgtccagctccccaaggggcagcacagattcccttaaccaaggtgcttctcctggggggctgctggacccggcctgccagaagacggaccatttcctgtcctgctacccctggttccacggccccatctccagagtgaaagcagctcagctggttcagctgcagggccctgatgctcatggagtgttcctggtgcggcagagcgagacgcggcgtggggaatacgtgctcactttcaactttcaggggatagccaagcacctgcgcctgtcgctgacagagcggggccagtgccgtgtgcagcacctccactttccctcggtcgtggacatgctccaccacttccagcgctcgcccatcccactcgagtgcggcgccgcctgtgatgtccggctctccagctacgtggtagtcgtctcccaaccaccaggttcctgcaacacggtcctcttccctttctcccttcctcactgggattcagagtcccttcctcactggggttcagagttgggccttccccaccttagttcttctggctgtccccgggggctcagcccagagggtctcccagggcgatcctcaccccccgagcagatcttccacctggtgccttcgcccgaagaactggccaacagcctgcagcacctggagcatgagcctgtgaatcgagcccgggactcggactacgaaatggactcatcctcccggagccacctgcgggccatagacaatcagtacacacctctctga

SEQ ID NO: 511 - DNA, 2112 bp, Homo sapiens;
atgactgctgtgggccgaaggtgccccgcgctggggtcccgaggggctgctggagagccagaggctggcagcgactatgtgaagttctccaaggagaagtacatcctggactcatcgccagagaaactccacaaggaattggaggaggagctcaaactcagcagcacggatctccgcagccatgcctggtaccatggccgcatcccccgagaggtctcggagaccttggtacaacgcaacggcgacttcctcatccgggactcactcaccagcctgggcgactatgtgctcacgtgccgctggcgcaaccaggccttgcacttcaagatcaacaaggtggtggtgaaggcaggcgagagctacacacacatccagtacctgtttgagcaggagagctttgaccacgtgcccgccctcgtgcgctatcatgtgggcagccgcaaggctgtgtcagagcagagtggtgccatcatctactgcccggtgaaccgcaccttcccactgcgctacctcgaggccagctatggcctgggacaggggagtagcaagcctgctagccccgtcagcccctcaggccccaagggcagccacatgaagcggcgcagcgtcaccatgaccgatgggctcactgctgacaaggtcacccgcagcgatggctgccccaccagtacgtcgctgccccgccctcgggactccatccgcagctgtgccctcagcatggaccagatcccagacctgcactcacccatgtcgcccatctccgagagccctagctcccctgcctacagcactgtaacccgtgtccatgccgcccctgcagccccttctgccacagcattgcctgcctcccctgtcgcccgccgttccagtgagccccagctgtgtcccggaagtgccccaaagacccatggggagtcagacaagggcccccacaccagcccctcccacacccttggcaaggcctccccgtcaccatcactcagcagctacagtgacccggactctggccactactgccagctccagcctcccgtgcgtggcagccgagagtgggcagcgactgagacctccagccagcaggccaggagctatggggagaggctaaaggaactgtcagaaaatggggcccctgaaggggactggggcaagaccttcacagtccccatcgtggaagtcacttcttccttcaacccggccaccttccagtcactactgatccccagggataaccggccactggaggtgggccttctgcgcaaggtcaaggagctgctggcagaagtggatgcccggacgctggcccggcatgtcaccaaggtggactgcctggttgctaggatactgggcgttaccaaggagatgcagaccctaatgggagtccgctggggcatggaactgctcaccctcccccatggccggcagctacgcctagacctgctggaaaggttccacaccatgtccatcatgctggccgtggacatcctgggctgcaccggctctgcggaggagcgggcagcgctgctgcacaagaccattcagctggcggccgagctgcgggggactatgggcaacatgttcagcttcgcggcggtcatgggtgccctggacatggcccagatttctcggctggagcagacatgggtgaccctgcggcagcgacacacagagggtgccatcctgtacgagaagaagctcaagccttttctcaagagcctcaacgagggcaaagaaggcccgccgctgagcaacaccacgtttcctcatgtgctgcccctcatcaccctgctggagtgtgactcggccccaccagagggccctgagccctggggcagcacggagcacggcgtggaggtggtgctggctcacctggaggccgcccgcacagtggcacaccacggaggcctgtaccacaccaatgctgaagtcaagctgcaggggttccaggcccggccggagctcctggaggtgttcagcacggagttccagatgcgccttctctggggcagtcagggtgccagcagcagccaggcccggcgctatgagaagttcgacaaggtcctcactgccctgtcccacaagctggaacctgctgtccgctccagcgagctgtga

SEQ ID NO: 512 - DNA, 1515 bp, Homo sapiens;
atggagcccgccggcccggcccccggccgcctcgggccgctgctctgcctgctgctcgccgcgtcctgcgcctggtcaggagtggcgggtgaggaggagctgcaggtgattcagcctgacaagtccgtgttggttgcagctggagagacagccactctgcgctgcactgcgacctctctgatccctgtggggcccatccagtggttcagaggagctggaccaggccgggaattaatctacaatcaaaaagaaggccacttcccccgggtaacaactgtttcagacctcacaaagagaaacaacatggacttttccatccgcatcggtaacatcaccccagcagatgccggcacctactactgtgtgaagttccggaaagggagccccgatgacgtggagtttaagtctggagcaggcactgagctgtctgtgcgcgccaaaccctctgcccccgtggtatcgggccctgcggcgagggccacacctcagcacacagtgagcttcacctgcgagtcccacggcttctcacccagagacatcaccctgaaatggttcaaaaatgggaatgagctctcagacttccagaccaacgtggaccccgtaggagagagcgtgtcctacagcatccacagcacagccaaggtggtgctgacccgcgaggacgttcactctcaagtcatctgcgaggtggcccacgtcaccttgcagggggaccctcttcgtgggactgccaacttgtctgagaccatccgagttccacccaccttggaggttactcaacagcccgtgagggcagagaaccaggtgaatgtcacctgccaggtgaggaagttctacccccagagactacagctgacctggttggagaatggaaacgtgtcccggacagaaacggcctcaaccgttacagagaacaaggatggtacctacaactggatgagctggctcctggtgaatgtatctgcccacagggatgatgtgaagctcacctgccaggtggagcatgacgggcagccagcggtcagcaaaagccatgacctgaaggtctcagcccacccgaaggagcagggctcaaataccgccgctgagaacactggatctaatgaacggaacatctatattgtggtgggtgtggtgtgcaccttgctggtggccctactgatggcggccctctacctcgtccgaatcagacagaagaaagcccagggctccacttcttctacaaggttgcatgagcccgagaagaatgccagagaaataacacaggacacaaatgatatcacatatgcagacctgaacctgcccaaggggaagaagcctgctccccaggctgcggagcccaacaaccacacggagtatgccagcattcagaccagcccgcagcccgcgtcggaggacaccctcacctatgctgacctggacatggtccacctcaaccggacccccaagcagccggcccccaagcctgagccgtccttctcagagtacgccagcgtccaggtcccgaggaagtga

SEQ ID NO: 513 - DNA, 1197 bp, Homo sapiens;
atgcccgtgccagcctcctggccccaccttcctagtcctttcctgctgatgacgctactgctggggagactcacaggagtggcaggtgaggacgagctacaggtgattcagcctgaaaagtccgtatcagttgcagctggagagtcggccactctgcgctgtgctatgacgtccctgatccctgtggggcccatcatgtggtttagaggagctggagcaggccgggaattaatctacaatcagaaagaaggccacttcccacgggtaacaactgtttcagaactcacaaagagaaacaacctggacttttccatcagcatcagtaacatcaccccagcagacgccggcacctactactgtgtgaagttccggaaagggagccctgacgacgtggagtttaagtctggagcaggcactgagctgtctgtgcgcgccaaaccctctgcccccgtggtatcgggccctgcggtgagggccacacctgagcacacagtgagcttcacctgcgagtcccatggcttctctcccagagacatcaccctgaaatggttcaaaaatgggaatgagctctcagacttccagaccaacgtggaccccgcaggagacagtgtgtcctacagcatccacagcacagccagggtggtgctgacccgtggggacgttcactctcaagtcatctgcgagatagcccacatcaccttgcagggggaccctcttcgtgggactgccaacttgtctgaggccatccgagttccacccaccttggaggttactcaacagcccatgagggcagagaaccaggcaaacgtcacctgccaggtgagcaatttctacccccggggactacagctgacctggttggagaatggaaatgtgtcccggacagaaacagcttcgaccctcatagagaacaaggatggcacctacaactggatgagctggctcctggtgaacacctgtgcccacagggacgatgtggtgctcacctgtcaggtggagcatgatgggcagcaagcagtcagcaaaagctatgccctggagatctcagcgcaccagaaggagcacggctcagatatcacccatgaagcagcgctggctcctactgctccactcctcgtagctctcctcctgggccccaagctgctactggtggttggtgtctctgccatctacatctgctggaaacagaaggcctga

SEQ ID NO: 514 - DNA, 2133 bp, Homo sapiens;
atgcaggggaagaagccgggcggttcgtcgggcggcggccggagcggcgagctgcagggggacgaggcgcagaggaacaagaaaaagaaaaagaaggtgtcctgcttttccaacatcaagatcttcctggtgtccgagtgcgccctgatgctggcgcagggcacggtgggcgcctacctggtgagcgtcctgaccaccctggagcgtaggttcaacctgcagagcgctgacgtgggtgtgatcgctagcagcttcgagatcgggaacctggcgctcatcctcttcgtgagctacttcggggcacgcgggcaccggccgcgcctgatcggctgcggcggcatcgtcatggcgctgggcgcgctgctgtcggcgctgcccgagttcctgacccaccagtacaagtacgaggcgggcgagatccgctggggcgccgagggccgcgacgtctgcgcagccaacggctcgggcggcgacgaggggcccgaccccgacctcatctgccgcaaccggacggctaccaacatgatgtacttgctgctcattggggcccaggtgctcctgggcatcggtgctacccctgtgcagcccctgggcgtctcctacatcgacgaccacgtgcggaggaaggactcctcgctctatataggaatcctgttcacgatgctggtatttggaccagcctgcgggtttatcctgggctctttctgtaccaaaatctacgtggatgcggtcttcattgacacaagtaacctggacatcactccggacgacccccgctggatcggagcctggtggggtggctttctgctctgcggtgccttactcttcttctcttccctcttgatgtttgggtttccacagtccctgcccccgcactcagagcccgccatggaaagcgagcaggccatgctctccgaaagagaatacgagagacccaagcccagcaacggggtcctgaggcaccccctggagccagacagcagtgcctcctgtttccagcagctgagagtgatcccgaaggtcaccaagcacctgctctcaaaccctgtgttcacctgcatcatcctggccgcctgcatggagattgcagtggtggctggcttcgctgcctttttggggaagtacctggagcagcagtttaacctcaccacctcttctgccaaccagctgcttgggatgactgcgatcccgtgtgcttgtctgggtatcttcctgggaggtcttttggtgaagaagctcagcctgtctgccctgggggccattcggatggccatgctcgtcaacctggtgtccactgcttgctacgtctccttcctcttcctgggctgcgacactggccctgtggctggggttactgttccctatggaaacagcacagcacctggctcagccctggacccctactcgccctgcaataataactgtgaatgccaaaccgattccttcactccagtgtgtggggcagatggcatcacctacctgtctgcctgctttgctggctgcaacagcacgaatctcacgggctgtgcgtgcctcaccaccgtccctgctgagaacgcaaccgtggttcctggaaaatgccccagtcctgggtgccaagaggccttcctcactttcctctgtgtgatgtgtatctgcagcctgatcggtgccatggcacagacaccctcagtcatcatcctcatcaggacagtcagccctgaactcaagtcttacgctttgggagttctttttctcctccttcgtttgttgggcttcatccctccacccctcatcttcggggctggcatcgactccacctgcctgttctggagcacgttctgtggggagcaaggcgcctgcgtcctctacgacaatgtggtctaccgatacctgtatgtcagcatcgccatcgcgctcaaatccttcgccttcatcctgtacaccaccacgtggcagtgcctgaggaaaaactataaacgctacatcaaaaaccacgagggcgggctgagcaccagtgagttctttgcctctactctgaccctagacaacctggggagggaccctgtgcccgcaaaccagacacataggacaaagtttatctataacctggaagaccatgagtggtgtgaaaacatggagtccgttttatag

SEQ ID NO: 515 - DNA, 1659 bp, Homo sapiens;
atggacaatatgtctattacgaatacaccaacaagtaatgatgcctgtctgagcattgtgcatagtttgatgtgccatagacaaggtggagagagtgaaacatttgcaaaaagagcaattgaaagtttggtaaagaagctgaaggagaaaaaagatgaattggattctttaataacagctataactacaaatggagctcatcctagtaaatgtgttaccatacagagaacattggatgggaggcttcaggtggctggtcggaaaggatttcctcatgtgatctatgcccgtctctggaggtggcctgatcttcacaaaaatgaactaaaacatgttaaatattgtcagtatgcgtttgacttaaaatgtgatagtgtctgtgtgaatccatatcactacgaacgagttgtatcacctggaattgatctctcaggattaacactgcagagtaatgctccatcaagtatgatggtgaaggatgaatatgtgcatgactttgagggacagccatcgttgtccactgaaggacattcaattcaaaccatccagcatccaccaagtaatcgtgcatcgacagagacatacagcaccccagctctgttagccccatctgagtctaatgctaccagcactgccaactttcccaacattcctgtggcttccacaagtcagcctgccagtatactggggggcagccatagtgaaggactgttgcagatagcatcagggcctcagccaggacagcagcagaatggatttactggtcagccagctacttaccatcataacagcactaccacctggactggaagtaggactgcaccatacacacctaatttgcctcaccaccaaaacggccatcttcagcaccacccgcctatgccgccccatcccggacattactggcctgttcacaatgagcttgcattccagcctcccatttccaatcatcctgctcctgagtattggtgttccattgcttactttgaaatggatgttcaggtaggagagacatttaaggttccttcaagctgccctattgttactgttgatggatacgtggacccttctggaggagatcgcttttgtttgggtcaactctccaatgtccacaggacagaagccattgagagagcaaggttgcacataggcaaaggtgtgcagttggaatgtaaaggtgaaggtgatgtttgggtcaggtgccttagtgaccacgcggtctttgtacagagttactacttagacagagaagctgggcgtgcacctggagatgctgttcataagatctacccaagtgcatatataaaggtctttgatttgcgtcagtgtcatcgacagatgcagcagcaggcggctactgcacaagctgcagcagctgcccaggcagcagccgtggcaggaaacatccctggcccaggatcagtaggtggaatagctccagctatcagtctgtcagctgctgctggaattggtgttgatgaccttcgtcgcttatgcatactcaggatgagttttgtgaaaggctggggaccggattacccaagacagagcatcaaagaaacaccttgctggattgaaattcacttacaccgggccctccagctcctagacgaagtacttcataccatgccgattgcagacccacaacctttagactga

SEQ ID NO: 516 - DNA, 267 bp, Homo sapiens;
atgtctattatggaccacagccccaccacgggcgtggtcacagtcatcgtcatcctcattgccatcgcggccctgggggccttgatcctgggctgctggtgctacctgcggctgcagcgcatcagccagtcagaggacgaggagagcatcgtgggggatggggagaccaaggaacccttcctgctggtgcagtattcggccaagggaccgtgcgtggagagaaaggccaagctgatgactcccaacggcccggaagtccacggctga

SEQ ID NO: 517 - DNA, 2298 bp, Homo sapiens;
atggcaggatttaagcgagggtatgatggaaagattgctggattatatgatctggataaaaccttgggtcgaggccattttgccgtggttaaacttgccaggcatgtctttacgggtgaaaaggtggcagtaaaagttattgacaagacaaaactggacactctagctactggtcatcttttccaggaagtgagatgcatgaaactagtgcagcatcctaacatcgtccgcctttatgaagttattgacacccagaccaaactatatcttattctagaacttggggatggaggagatatgtttgattatataatgaaacatgaggagggtcttaatgaagacttggccaagaagtattttgctcagatagttcatgctatatcttattgccataaactccatgtggttcacagagacttaaaaccagagaatgtagtcttctttgaaaaacaaggtcttgtaaagttgacagactttgggttcagcaacaaatttcaaccagggaagaagctcactacaagctgtggatctcttgcatattccgctccagaaattctgcttggtgatgagtatgatgcacctgcagtagatatttggagtctgggagtgatccttttcatgttggtgtgtgggcagccgccctttcaagaagccaatgacagtgaaacactgacaatgatcatggattgcaaatatacagtaccatcccatgtgtctaaagagtgtaaagacctaatcacacggatgctacagagagatcccaagagaagggcttctttagaagagattgaaaatcatccttggcttcagggagtggacccttcaccagctacaaagtataacattccccttgtgtcatacaaaaatctctcggaagaggagcacaacagcatcattcagcgcatggtgcttggggacatagcggatcgagacgccattgtagaagccctggaaaccaacaggtataaccatatcacagccacatacttcctgctggctgaaaggatcctgagagaaaagcaagagaaagaaatacagaccagatctgcaagcccgagcaatatcaaggcccagtttaggcagtcatggccaaccaaaattgatgtaccccaggaccttgaggatgacctcacggccactcctttgtcccacgcgactgtccctcagtctcctgctcgggctgctgacagtgtcctcaatggccacaggagcaaaggcctgtgtgactcagctaagaaagatgacctccctgagttggctggaccagcactctctacggtgccacccgcaagcttaaaacccacagccagtgggcggaagtgtctgttcagggtggaagaagatgaagaggaagatgaggaggacaagaaacccatgtccctctcaacacaagtggttttgcgccggaagccatctgtaaccaaccgcctgacatccaggaagagtgcgcccgtcctcaaccagatctttgaggaaggggaatctgacgatgagtttgacatggatgagaatctgcctcccaagttgagcaggttaaagatgaatatagcttctccaggtacagttcacaaacgctaccaccggaggaaaagtcagggccggggctccagctgcagtagttcggagaccagtgatgatgattctgaaagccggcggcggctcgataaagatagcgggttcacctactcctggcaccgacgggatagcagcgaggggccccctggcagtgagggggatggcgggggccagagcaagccaagcaatgccagtggaggggtggacaaggccagccccagtgagaacaatgctggtgggggcagtccctccagcggctcgggtggcaaccccaccaatacatcgggtaccacacgccgctgtgccggccccagcaactccatgcagctggcctctcgcagtgctggggagctcgttgagagcctcaaactcatgagcctctgcctcggctcccagcttcatgggagcaccaagtacattattgatccacagaatggcttgtcattttccagtgtgaaagtccaagagaaatctacgtggaaaatgtgcattagctccacagggaatgcagggcaggtccctgcagtgggcggcataaagtttttctctgaccacatggcagataccaccactgaattggaacggataaagagcaagaacctgaaaaataacgtgctgcagctacctctgtgcgaaaagaccatctctgtgaacatccagcggaaccctaaggaggggctgctgtgcgcatccagcccagccagctgttgccatgtcatctga

SEQ ID NO: 518 - DNA, 1587 bp, Homo sapiens;
atggcggacgaggacggggaagggattcatccctcagcccctcacaggaacggaggtggcggcggcggcggggggtctgggctccactgcgccgggaacggcggcgggggaggcggcggcccgcgggtcgtgcgcatcgtcaagtccgagtccggctacggcttcaacgtgcggggccaagtgagcgagggcgggcaactgcggagcatcaacggggagctgtacgcgccgctgcagcatgtgagcgccgtgctgcccgggggggcggccgatcgggccggggtgcgcaagggggaccgcatcctggaggtgaaccacgtgaatgttgagggggcgacacacaagcaggtggtggacctgattcgagcaggcgagaaggaattgatcttgacagtgttatctgtacctcctcatgaggcagataacctagatcccagtgacgactcgttgggacaatcattttatgattacacagaaaagcaagcagtgcccatatcggtccccagatacaaacatgtggagcagaatggtgagaagtttgtggtatataatgtttacatggcagggaggcagctgtgttctaagcggtaccgggagtttgctatcctacaccagaacctgaagagagagtttgccaactttacatttcctcgactcccagggaagtggccattttcattatcagaacaacaattagatgcccgacgtcggggattggaagaatatctagaaaaagtgtgttcaatacgagtaattggtgagagtgacatcatgcaggaattcctatcagaatccgatgagaactacaatggtgtgtccgacgtagagctgagagtagcattaccagatggaacaacggttacagtcagggttaaaaagaacagtactacagaccaagtatatcaggctatcgcagcaaaggttggcatggacagtacgacagtgaattactttgccttatttgaagtgatcagtcactcctttgtacgtaaattggcacctaatgagtttcctcacaaactctacattcagaattatacatcagctgtgccaggcacctgcttgaccattcgaaagtggctttttacaacagaagaagaaattctcttaaatgacaatgaccttgctgttacctacttctttcatcaggcagtcgatgatgtgaagaaaggttacatcaaagcagaagaaaagtcctatcaattacagaagctatacgaacaaagaaaaatggtcatgtacctcaacatgctaaggacttgtgagggctacaatgaaatcatctttccccactgtgcctgtgactccaggaggaaggggcacgttatcacagccatcagcatcacgcactttaaactgcatgcctgcactgaagaaggacagctggagaaccaggtaattgcatttgaatgggatgagatgcagcgatgggacacagatgaagaagggatggccttctgtttcgaatatgcacgaggagagaagaagccccgatgggttaaaatcttcacgccatatttcaattacatgcatgagtgcttcgagagggtgttctgcgagctcaagtggagaaaagaggaatattag

SEQ ID NO: 519 - DNA, 1653 bp, Homo sapiens;
atggtgggtgaagagaagatgtctctaagaaaccggctgtcaaagtccagggaaaatcctgaggaagatgaagaccagagaaaccctgcaaaggagtccctagagacacctagtaatggtcgaattgacataaaacagttgatagcaaagaagataaagttgacagcagaggcagaggaattgaagccattttttatgaaggaagttggcagtcactttgatgattttgtgaccaatctcattgaaaagtcagcatcattagataatggtgggtgcgctctcacaaccttttctgttcttgaaggagagaaaaacaaccatagagcgaaggatttgagagcacctccagaacaaggaaagatttttattgcaaggcgctctctcttagatgaactgcttgaagtggaccacatcagaacaatatatcacatgtttattgccctcctcattctctttatcctcagcacacttgtagtagattacattgatgaaggaaggctggtgcttgagttcagcctcctgtcttatgcttttggcaaatttcctaccgttgtttggacctggtggatcatgttcctgtctacattttcagttccctattttctgtttcaacattgggccactggctatagcaagagttctcatccgctgatccgttctctcttccatggctttcttttcatgatcttccagattggagttctaggttttggaccaacatatgttgtgttagcatatacactgccaccagcttcccggttcatcattatattcgagcagattcgttttgtaatgaaggcccactcatttgtcagagagaacgtgcctcgggtactaaattcagctaaggagaaatcaagcactgttccaatacctacagtcaaccagtatttgtacttcttatttgctcctacccttatctaccgtgacagctatcccaggaatcccactgtaagatggggttatgtcgctatgaagtttgcacaggtctttggttgctttttctatgtgtactacatctttgaaaggctttgtgcccccttgtttcggaatatcaaacaggagcccttcagcgctcgtgttctggtcctatgtgtatttaactccatcttgccaggtgtgctgattctcttccttactttttttgcctttttgcactgctggctcaatgcctttgctgagatgttacgctttggtgacaggatgttctataaggattggtggaactccacgtcatactccaactattatagaacctggaatgtggtggtccatgactggctatattactatgcttacaaggactttctctggtttttctccaagagattcaaatctgctgccatgttagctgtctttgctgtatctgctgtagtacacgaatatgccttggctgtttgcttgagctttttctatcccgtgctcttcgtgctcttcatgttctttggaatggctttcaacttcattgtcaatgatagtcggaaaaagccgatttggaatgttctgatgtggacttctcttttcttgggcaatggagtcttactctgcttttattctcaagaatggtatgcacgtcagcactgtcctctgaaaaatcccacatttttggattatgtccggccacgttcctggacttgtcgttacgtgttttag

SEQ ID NO: 520 - DNA, 6645 bp, Homo sapiens;
atggcgacacggagcagcaggagggagtcgcgactcccgttcctattcaccctggtcgcactgctgccgcccggagctctctgcgaagtctggacgcagaggctgcacggcggcagcgcgcccttgccccaggaccggggcttcctcgtggtgcagggcgacccgcgcgagctgcggctgtgggcgcgcggggatgccaggggggcgagccgcgcggacgagaagccgctccggaggaaacggagcgctgccctgcagcccgagcccatcaaggtgtacggacaggttagtctgaatgattcccacaatcagatggtggtgcactgggctggagagaaaagcaacgtgatcgtggccttggcccgagatagcctggcattggcgaggcccaagagcagtgatgtgtacgtgtcttacgactatggaaaatcattcaagaaaatttcagacaagttaaactttggcttgggaaataggagtgaagctgttatcgcccagttctaccacagccctgcggacaacaagcggtacatctttgcagacgcttatgcccagtacctctggatcacgtttgacttctgcaacactcttcaaggcttttccatcccatttcgggcagctgatctcctcctacacagtaaggcctccaaccttctcttgggctttgacaggtcccaccccaacaagcagctgtggaagtcagatgactttggccagacctggatcatgattcaggaacatgtcaagtccttttcttggggaattgatccctatgacaaaccaaataccatctacattgaacgacatgaaccctctggctactccactgtcttccgaagtacagatttcttccagtcccgggaaaaccaggaagtgatccttgaggaagtgagagattttcagcttcgggacaagtacatgtttgctacaaaggtggtgcatctcttgggcagtgaacagcagtcttctgtccagctctgggtctcctttggccggaagcccatgagagcagcccagtttgtcacaagacatcctattaatgaatattacatcgcagatgcctccgaggaccaggtgtttgtgtgtgtcagccacagtaacaaccgcaccaatttatacatctcagaggcagaggggctgaagttctccctgtccttggagaacgtgctctattacagcccaggaggggccggcagtgacaccttggtgaggtattttgcaaatgaaccatttgctgacttccaccgagtggaaggattgcaaggagtctacattgctactctgattaatggttctatgaatgaggagaacatgagatcggtcatcacctttgacaaagggggaacctgggagtttcttcaggctccagccttcacgggatatggagagaaaatcaattgtgagctttcccagggctgttcccttcatctggctcagcgcctcagtcagctcctcaacctccagctccggagaatgcccatcctgtccaaggagtcggctccaggcctcatcatcgccactggctcagtgggaaagaacttggctagcaagacaaacgtgtacatctctagcagtgctggagccaggtggcgagaggcacttcctggacctcactactacacatggggagaccacggcggaatcatcacggccattgcccagggcatggaaaccaacgagctaaaatacagtaccaatgaaggggagacctggaaaacattcatcttctctgagaagccagtgtttgtgtatggcctcctcacagaacctggggagaagagcactgtcttcaccatctttggctcgaacaaagagaatgtccacagctggctgatcctccaggtcaatgccacggatgccttgggagttccctgcacagagaatgactacaagctgtggtcaccatctgatgagcgggggaatgagtgtttgctgggacacaagactgttttcaaacggcggaccccccatgccacatgcttcaatggagaggactttgacaggccggtggtcgtgtccaactgctcctgcacccgggaggactatgagtgtgacttcggtttcaagatgagtgaagatttgtcattagaggtttgtgttccagatccggaattttctggaaagtcatactcccctcctgtgccttgccctgtgggttctacttacaggagaacgagaggctaccggaagatttctggggacacttgtagcggaggagatgttgaagcgcgactggaaggagagctggtcccctgtcccctggcagaagagaacgagttcattctgtatgctgtgaggaaatccatctaccgctatgacctggcctcgggagccaccgagcagttgcctctcaccgggctacgggcagcagtggccctggactttgactatgagcacaactgtttgtattggtccgacctggccttggacgtcatccagcgcctctgtttgaatggaagcacagggcaagaggtgatcatcaattctggcctggagacagtagaagctttggcttttgaacccctcagccagctgctttactgggtagatgcaggcttcaaaaagattgaggtagctaatccagatggcgacttccgactcacaatcgtcaattcctctgtgcttgatcgtcccagggctctggtcctcgtgccccaagagggggtgatgttctggacagactggggagacctgaagcctgggatttatcggagcaatatggatggttctgctgcctatcacctggtgtctgaggatgtgaagtggcccaatggcatctctgtggacgaccagtggatttactggacggatgcctacctggagtgcatagagcggatcacgttcagtggccagcagcgctctgtcattctggacaacctcccgcacccctatgccattgctgtctttaagaatgaaatctactgggatgactggtcacagctcagcatattccgagcttccaaatacagtgggtcccagatggagattctggcaaaccagctcacggggctcatggacatgaagattttctacaaggggaagaacactggaagcaatgcctgtgtgcccaggccatgcagcctgctgtgcctgcccaaggccaacaacagtagaagctgcaggtgtccagaggatgtgtccagcagtgtgcttccatcaggggacctgatgtgtgactgccctcagggctatcagctcaagaacaatacctgtgtcaaacaagagaacacctgtcttcgcaaccagtatcgctgcagcaacgggaactgtatcaacagcatttggtggtgtgactttgacaacgactgtggagacatgagcgatgagagaaactgccctaccaccatctgtgacctggacacccagtttcgttgccaggagtctgggacttgtatcccactgtcctataaatgtgaccttgaggatgactgtggagacaacagtgatgaaagtcattgtgaaatgcaccagtgccggagtgacgagtacaactgcagttccggcatgtgcatccgctcctcctgggtatgtgacggggacaacgactgcagggactggtctgatgaagccaactgtaccgccatctatcacacctgtgaggcctccaacttccagtgccgaaacgggcactgcatcccccagcggtgggcgtgtgacggggatacggactgccaggatggttccgatgaggatccagtcaactgtgagaagaagtgcaatggattccgctgcccaaacggcacttgcatcccatccagcaaacattgtgatggtctgcgtgattgctctgatggctccgatgaacagcactgcgagcccctctgtacgcacttcatggactttgtgtgtaagaaccgccagcagtgcctgttccactccatggtctgtgacggaatcatccagtgccgcgacgggtccgatgaggatgcggcgtttgcaggatgctcccaagatcctgagttccacaaggtatgtgatgagttcggtttccagtgtcagaatggagtgtgcatcagtttgatttggaagtgcgacgggatggatgattgcggcgattattctgatgaagccaactgcgaaaaccccacagaagccccaaactgctcccgctacttccagtttcggtgtgagaatggccactgcatccccaacagatggaaatgtgacagggagaacgactgtggggactggtctgatgagaaggattgtggagattcacatattcttcccttctcgactcctgggccctccacgtgtctgcccaattactaccgctgcagcagtgggacctgcgtgatggacacctgggtgtgcgacgggtaccgagattgtgcagatggctctgacgaggaagcctgccccttgcttgcaaacgtcactgctgcctccactcccacccaacttgggcgatgtgaccgatttgagttcgaatgccaccaaccgaagacgtgtattcccaactggaagcgctgtgacggccaccaagattgccaggatggccgggacgaggccaattgccccacacacagcaccttgacttgcatgagcagggagttccagtgcgaggacggggaggcctgcattgtgctctcggagcgctgcgacggcttcctggactgctcggacgagagcgatgaaaaggcctgcagtgatgagttgactgtgtacaaagtacagaatcttcagtggacagctgacttctctggggatgtgactttgacctggatgaggcccaaaaaaatgccctctgcttcttgtgtatataatgtctactacagggtggttggagagagcatatggaagactctggagacccacagcaataagacaaacactgtattaaaagtcttgaaaccagataccacgtatcaggttaaagtacaggttcagtgtctcagcaaggcacacaacaccaatgactttgtgaccctgaggaccccagagggattgccagatgcccctcgaaatctccagctgtcactccccagggaagcagaaggtgtgattgtaggccactgggctcctcccatccacacccatggcctcatccgtgagtacattgtagaatacagcaggagtggttccaagatgtgggcctcccagagggctgctagtaactttacagaaatcaagaacttattggtcaacactctatacaccgtcagagtggctgcggtgactagtcgtggaataggaaactggagcgattctaaatccattaccaccataaaaggaaaagtgatcccaccaccagatatccacattgacagctatggtgaaaattatctaagcttcaccctgaccatggagagtgatatcaaggtgaatggctatgtggtgaaccttttctgggcatttgacacccacaagcaagagaggagaactttgaacttccgaggaagcatattgtcacacaaagttggcaatctgacagctcatacatcctatgagatttctgcctgggccaagactgacttgggggatagccctctggcatttgagcatgttatgaccagaggggttcgcccacctgcacctagcctcaaggccaaagccatcaaccagactgcagtggaatgtacctggaccggcccccggaatgtggtttatggtattttctatgccacgtcctttcttgacctctatcgcaacccgaagagcttgactacttcactccacaacaagacggtcattgtcagtaaggatgagcagtatttgtttctggtccgtgtagtggtaccctaccaggggccatcctctgactacgttgtagtgaagatgatcccggacagcaggcttccaccccgtcacctgcatgtggttcatacgggcaaaacctccgtggtcatcaagtgggaatcaccgtatgactctcctgaccaggacttgttgtatgcagttgcagtcaaagatctcataagaaagactgacaggagctacaaagtaaaatcccgtaacagcactgtggaatacacccttaacaagttggagcctggcgggaaataccacatcattgtccaactggggaacatgagcaaagattccagcataaaaattaccacagtttcattatcagcacctgatgccttaaaaatcataacagaaaatgatcatgttcttctgttttggaaaagcctggctttaaaggaaaagcattttaatgaaagcaggggctatgagatacacatgtttgatagtgccatgaatatcacagcttaccttgggaatactactgacaatttctttaaaatttccaacctgaagatgggtcataattacacgttcaccgtccaagcaagatgcctttttggcaaccagatctgtggggagcctgccatcctgctgtacgatgagctggggtctggtgcagatgcatctgcaacgcaggctgccagatctacggatgttgctgctgtggtggtgcccatcttattcctgatactgctgagcctgggggtggggtttgccatcctgtacacgaagcaccggaggctgcagagcagcttcaccgccttcgccaacagccactacagctccaggctggggtccgcaatcttctcctctggggatgacctgggggaagatgatgaagatgcccctatgataactggattttcagatgacgtccccatggtgatagcctga

SEQ ID NO: 521 - DNA, 3999 bp, Homo sapiens;
atgcagcaggcgccgcagccttacgagttcttcagcgaggagaacagtccgaaatggcggggactgttggtctcggccctgcggaaggttcaggaacaagtgcatcccactctctcagctaatgaagagtctctctattatattgaagagctgatttttcagctgcttaataaattatgcatggcccagccaaggactgttcaagatgtagaggagcgagttcagaagacctttcctcacccaattgataaatgggccattgctgatgcacaatctgctatagaaaaacgaaaacgaagaaatcctcttttactgcctgtggacaaaatccatccttcgttgaaggaagtattagggtacaaagtggactaccatgtatccctatatattgtggctgtactagagtatatctcagctgatattttaaaattggctggtaattatgtttttaatatccggcattatgaaatatctcagcaggacattaaagtgtcaatgtgtgcggataaggttttgatggacatgtttgatcaggatgacataggtttggtttctctctgtgaagatgaacctagttcttctggtgaattaaactactatgatcttgtcagaactgaaatcgcagaagaaagacagtatctacgggaattaaatatgatcataaaagtgtttcgagaagcctttctttctgatagaaagctgtttaaaccttctgatatcgaaaagatttttagtaacatttcagatatacatgaattgactgtgaaacttttaggtttgattgaagacacagttgaaatgactgatgaaagcagtcctcatcccttagctggcagctgttttgaagatttggcagaagagcaagcatttgatccttatgaaacattatcacaggacattctttcaccagagtttcatgaacatttcaataaattgatggccagacctgcagttgctctacactttcagtccattgctgatggttttaaagaggcagttcgttatgtccttccacgtcttatgctggtgccagtgtatcactgttggcactactttgagttactaaagcaattgaaagcatgtagtgaagaacaagaagacagagaatgtttgaaccaagctattactgctctcatgaatctccaaggtagcatggaccgaatttacaagcagtattcacctagacgtcgacctggagatcctgtttgccctttttatagtcaccaattaagaagcaaacacctggctatcaaaaaaatgaatgaaattcagaaaaatatcgatggatgggaaggcaaagatattggacagtgttgtaatgaattcattatggagggaccattgacaagaatcggtgccaaacatgaacggcatatttttctgtttgatggcttaatgatcagttgtaaacctaatcatggccagactcggcttccaggttacagtagtgcagaatacaggttaaaagaaaaatttgtcatgaggaaaatacaaatttgtgataaagaagatacttgtgagcacaagcatgcatttgaattagtatccaaagatgagaacagcataatatttgctgctaagtctgctgaagaaaaaaacaactggatggcagcccttatttctcttcattatcgtagtactctagatcgaatgttagattcagtattattgaaagaagaaaatgagcaaccactgagattaccaagtcctgaagtatatcgttttgtagtaaaagactctgaggaaaacattgtttttgaagacaacttgcaaagtagaagtggcatccccattattaaaggaggaactgtagtgaaattaattgaaaggttaacatatcatatgtatgcagatcccaattttgttcgtacttttcttaccacatatcgttcattttgtaaaccacaggaattgctgagcttactgattgaacggtttgaaattccagagccagaacctactgacgcagacaaattggcaatagagaaaggcgagcagccaatcagtgcagaccttaaaagatttcgcaaggaatatgtccaaccagtacaacttaggatcttaaatgtatttcggcattgggttgaacatcatttttatgactttgaaagagacttggaattgcttgaaagactagaatccttcatttcaagtgtaagagggaaagctatgaaaaaatgggtagagtcaattgctaagatcatcaggaggaagaagcaagctcaggcaaacggagtaagccataatattacctttgaaagtccacctccaccaattgaatggcatatcagcaaaccaggacagtttgaaacatttgatctcatgacacttcatccaatagaaattgcacgtcagctgacacttttggagtctgatctttacaggaaagttcaaccgtctgaacttgtagggagtgtgtggaccaaagaagataaagaaataaattctccaaatttattaaaaatgattcgccataccacaaatctcaccctctggtttgaaaaatgcattgtggaagcagaaaattttgaagaacgggtggcagtactaagtagaattatagaaattctgcaagtttttcaagatttgaataatttcaatggcgtattggagatagtcagtgcagtaaattcagtgtcagtatacagactagaccatacctttgaggcactgcaggaaaggaaaaggaaaattttggacgaagctgtggaattaagtcaagatcactttaaaaaatacctagtaaaacttaagtcaatcaatccaccttgtgtgcctttttttggaatatatttaacaaatattctgaagaccgaagaagggaataatgattttttaaaaaagaaagggaaagatttaatcaatttcagtaagaggaggaaagtagctgaaattactggagaaattcagcagtatcagaatcagccttactgtttacggatagaaccagatatgaggagattctttgaaaaccttaaccccatgggaagtgcatctgaaaaagagtttacagattatttgttcaacaagtcactagaaattgaacctcgaaactgcaaacagccacctcgatttcctaggaaatcaactttttccttaaaatctcctggaataaggcctaacacaggccgacatggctctacctcaggtactttacgaggtcacccaacaccattagaaagagaaccatgtaaaataagctttagtcggattgctgaaactgagctggaatcaacagtgtcagcaccaacctctccaaatacaccatctactccaccagtatctgcttcttcagaccttagtgtatttttagatgtggatctcaacagctcctgtggcagcaatagcatctttgctccagtgcttttgccacattcaaagtctttctttagttcatgtggtagtttacataaactaagtgaagagcccctgattcctcctcctcttcctcctcgaaaaaagtttgatcatgatgcttcaaattccaagggaaatatgaaatctgatgatgatcctcctgctattccaccgagacagcctcctcctccaaaggtaaaacccagagttcctgttcctactggtgcatttgatgggcctctgcatagtccacctccgccaccaccaagagatcctcttcctgatacccctccaccagttccccttcggcctccagaacactttataaactgtccatttaatcttcagccacctccactggggcatcttcacagagattcagactggctcagagacattagtacgtgtccaaattcgccaagcactcctcctagcacaccctctccaagggtaccgcgtcgatgctatgtgctcagttctagtcagaataatcttgctcatcctccagctccccctgttccaccaaggcagaattcaagccctcatctgccaaaactgccaccaaagacttacaaacgggagctttcgcaccccccattgtacagactgcctttgctagaaaatgcagaaactccccaatga

SEQ ID NO: 522 - DNA, 2346 bp, Homo sapiens;
atgaccgctcccgaaaagcccgtgaaacaagaggaaatggctgccttggacgtggatagcggcggcggcggtggcggcggcggcggccacggcgagtatctgcagcagcagcaacagcacggaaacggtgcggtggcggcggcagcggcggcccaggacactcagccgtcaccgctcgctctgctggccgctacctgcagcaagatagggccgccatcgccgggcgacgacgaggaggaggcggccgccgcagccggggcccccgccgccgccggagcgacaggtgatttggcttctgcacagttaggaggagcaccaaaccgatgggaggttttgtcagccacacctacaactataaaagatgaagctggtaatctagtccagattccaagtgctgctacttcaagtgggcagtatgttcttccccttcagaatttgcagaatcaacaaatattttccgttgcaccaggatcagattcatcaaatggtacagtgtccagtgttcaatatcaagtgataccacagatccagtcagcagatggtcagcaggttcaaattggtttcacaggctcttcagataatgggggtataaatcaagaaagcagtcaaattcagatcattcctggctctaatcaaaccttacttgcctctggaacaccttctgctaacatccagaatctcataccacagactggtcaagtccaggttcagggagttgcaattggtggttcatcttttcctggtcaaacccaagtagttgctaatgtgcctcttggtctgccaggaaatattacgtttgtaccaatcaatagtgtcgatctagattctttgggactctcgggcagttctcagacaatgactgcaggcattaatgccgacggacatttgataaacacaggacaagctatggatagttcagacaattcagaaaggactggtgagcgggtttctcctgatattaatgaaactaatactgatacagatttatttgtgccaacatcctcttcatcacagttgcctgttacgatagatagtacaggtatattacaacaaaacacaaatagcttgactacatctagtgggcaggttcattcttcagatcttcagggaaattatatccagtcgcctgtttctgaagagacacaggcacagaatattcaggtttctacagcacagcctgttgtacagcatctacaacttcaagagtctcagcagccaaccagtcaagcccaaattgtgcaaggtattacaccacagacaatccatggtgtgcaagccagtggtcaaaatatatcacaacaggctttgcaaaatcttcagttgcagctgaatcctggaacctttttaattcaggcacagacagtgaccccttctggacaggtaacttggcaaacgtttcaagtacaaggggtccagaacttgcagaatttgcaaatacagaatactgctgcccaacaaataactttgacgcctgttcaaaccctcacacttggtcaagttgcggcaggtggagccttcacttcaactccagttagtctaagcactggtcagttgccaaatctacaaacagttacagtgaactctatagattctgctggtatacagctacatccaggagagaatgctgacagtcctgcagatattaggatcaaggaagaagaacctgatcctgaagagtggcagctcagtggtgattctaccttgaataccaatgacctaacacacttaagagtacaggtggtagatgaagaaggggaccaacaacatcaagaaggaaaaagacttcggagggtagcttgcacctgtcccaactgtaaagaaggtggtggaagaggtaccaatcttgggaaaaagaagcaacacatttgtcatataccaggatgtggtaaagtctatgggaagacctcacatctgagagctcatctgcgttggcattctggagaacgcccttttgtttgtaactggatgtactgtggtaaaagatttactcgaagtgatgaattacagaggcacagaagaacacatacaggtgagaagaaatttgtttgtccagaatgttcaaaacgctttatgagaagtgaccaccttgccaaacatattaaaacacaccagaataaaaaaggtattcactctagcagtacagtgctggcatctgtggaagctgcgcgagatgatactttgattactgcaggaggaacaacgcttatccttgcaaatattcaacaaggttctgtttcagggataggaactgttaatacttccgccaccagcaatcaagatatccttaccaacactgaaatacctttacagcttgtcacagtttctggaaatgagacaatggagtaa

SEQ ID NO: 523 - DNA, 1086 bp, Homo sapiens;
atgtacggcaaaggcaagagtaacagcagcgccgtcccgtccgacagccaggcccgggagaagttagcactctacgtatatgaatatctgctccatgtaggagctcagaaatcagctcaaacatttttatcagagataagatgggaaaaaaacatcacattgggggaaccaccaggattcttacattcttggtggtgtgtattttgggatctctactgtgcagctccagagagacgtgaaacatgtgaacactcaagtgaagcaaaagccttccatgattacagtgctgcagcagctcccagtccagtgctaggaaacattcccccaggagatggcatgccagtaggtcctgtaccaccagggttctttcagccttttatgtcacctcggtaccctggaggtccaaggcccccattgaggatacctaatcaggcacttggaggtgtcccaggaagtcagccattactccccagtggaatggatccaactcgacaacaaggacatccaaatatgggtgggccaatgcagagaatgactcctccaagaggaatggtgcccttaggaccacagaactatggaggtgcaatgagacccccactgaatgctttaggtggccctggaatgcctggaatgaacatgggtccaggtggtggtagaccttggccaaacccaacaaatgccaattcaataccatactcctcagcatctcctgggaattatgtaggtcctccaggaggtggagggccaccaggaacacccatcatgcctagtccagcagattcaaccaactctggtgataacatgtatactttaatgaatgcagtacctcctggacctaacagacctaattttccaatgggtcctgggtcagatggtcccatgggtggattaggaggaatggagtcacatcacatgaatggctctttaggctcaggagatatggacagtatttccaagaattctcccaataatatgagcctgagtaatcaaccgggcactccaagggatgatggcgaaatggggggaaatttcttaaatccttttcagagtgagagttactcccctagcatgacaatgagcgtgtga

SEQ ID NO: 524 - DNA, 3771 bp, Homo sapiens;
atggaccggcccctgtcgtcgtcggcggaggcggaggaggaactggagtggcaagtggcgagtcgcaggaggaaggcctgggccaagtgccgcagctcctggcaagcgtcggagacggaggatctgtccacagaagcgacgacgcaggacgaggaggaggacgaggaggaggacctccccggcgcgcagctgccggcagcggggggaagaggaaacgtgcccaacgagaagatcgcgatatggctcaaggactgccgtacacctttgggagcctcactggatgaacaaagcagtagtacactcaagggtgtgcttgtgagaaatggaggaagttttgaagatgatttgtcattgggagctgaagccaaccacctccatgaaagtgatgctcaaattgaaaactgcaataatatcttggccaaagagagaagattacagtttcatcagaaagggagaagtatgaattccactggatctgggaaaagtagtgggacagtttcaagtgtttcagaattgttggaactttatgaggaagatcctgaagaaattctttataatcttggatttggacgtgatgaaccagatattgcttctaaaattccttccagattttttaattcatcatcctttgccaaagggatagatattaaagtatttttgagtgctcagatgcaacggatggaagtagaaaacccaaattatgctttaacaagccgttttcgtcaaattgaagtgcttactactgtggccaatgcgttttcttctttatattctcaagtctccgggacgcccctgcagagaattggaagtatgtcctcagtgacctctaacaaggagacagacccacctccacctttaactcgaagtaacactgcaaatcgtttaatgaaaacactctcaaaactgaatttatgtgttgataaaacagagaaaggagaaagtagtagtccttctccatcagctgaaaaaggaaagattctaaatgtttcagtgattgaagaaagtggcaataaaaacgatcaaaagtctcaaaaaattatgaagaagaaagagtcatcttctatgttggctacagttaaagaagaagtctctggtagttcagcagctgttacggagaatgctgatagtgatagaatttctgatgaagcaaatagtaattttaaccaaggaactgaaaatgaacaaagtaaagaaactcaaagtcatgagagtaaactgggtgaggaatctggtattgtagaatccaaattagatagtgatttcaacatatccagccacagtgagctggaaaatagcagtgagctgaaaagtgtccatatatccacacctgaaaaagagccttgtgcaccactgacaataccatccataagaaatataatgacacagcagaaggactccttcgaaatggaagaggttcaaagtacggagggagaagctcctcatgttccagccacttaccagctaggtcttacgaagtcgaaaagagatcatctgttacgtactgcaagtcagcattccgatagcagtggttttgctgaagattctacagactgcctatcccttaatcatcttcaggttcaggagtccttgcaggctatggggagtagtgctgatagttgtgacagtgagacaacagttacgtcacttggtgaagaccttgccacaccaacagcacaagaccagccttattttaatgaatcagaggaggagtctcttgtccctcttcagaagggactagagaaggcagcagcagttgcagacaaaagaaaatcaggtagccaggatttccctcagtgcaacaccattgagaatacaggaactaaacagtccacctgtagtccaggggatcatatcattgaaattactgaagtggaagaggatttgtttccagcagagacagtagagctactgagggaagcaagtgctgaaagtgatgtgggtaaaagcagtgaaagtgaatttactcagtataccacacaccatattctgaaatcattggcttctattgaagctaaatgcagtgatatgagctctgaaaatacaactgggcctccctcttccatggacagagttaatacagctttgcaaagagctcaaatgaaggtttgcagtctgtctaatcaaaggatggggcgtagcctgctaaaatcaaaagatttgttaaaacaaaggtacttatttgcaaaagctggctatcctctaagaaggtctcagtctttaccaaccaccttattgagcccagtaagggttgtgtcctctgtcaatgttcgattatctccaggaaaagagaccagatgcagcccaccttccttcacctataagtacacacctgaagaggagcaggaattggaaaagcgggtgatggaacatgatggtcagtctttagttaaatcgaccattttcatctctccatcatctgtgaagaaagaagaagccccccagagtgaggcgccgcgggtggaggaatgccatcatggaaggactcctacctgttcacggcttgctccaccaccaatgtctcagtctacctgttcccttcattccatccactctgagtggcaagaaaggcccctgtgtgagcacacaagaactctgagcactcacagtgttcccaacatatcaggggctacttgtagtgccttcgcttcccctttcgggtgtccttactcacatagacatgccacctacccttaccgagtgtgctctgtgaatcctccttcagccatagaaatgcagttgcgaagagtattacatgatattagaaactcactgcagaatctttcacagtaccctatgatgagaggacctgatcctgctgctgctccatatagtactcagaaatcatctgttctacctctttatgaaaatacttttcaggagctccaggtaatgaggcggagcctgaatttgtttagaacacaaatgatggatttagaattggcaatgctgcgtcagcaaaccatggtttatcatcatatgactgaggaggagaggtttgaagttgatcagctccagggtttgagaaattcagtccgaatggaacttcaggacctggaactgcagctggaggagcgcctgctgggcctggaggagcagcttcgtgctgtgcgcatgccttcacccttccgctcctccgcactcatgggaatgtgtggcagtagaagcgctgataacttgtcatgcccttctccattgaatgtaatggaaccagtcactgaactgatgcaggagcagtcatacctgaagtctgaattgggcctgggacttggagaaatgggatttgaaattcctcctggagaaagctcagaatctgttttttcccaagcaacatcagaatcatcttctgtatgttctggtccctctcatgctaacagaagaactggagtaccttctactgcctcagtgggcaaatccaaaaccccattagtggcaaggaagaaagtgttccgagcatcggtggctctaacgccaacagctccttctagaacaggctctgtgcagacacctccagatttggaaagttctgaggaagttgatgcagctgaaggagccccagaagttgtaggacctaaatctgaagtggaagaagggcatggaaaactcccatcaatgccagctgctgaggaaatgcataaaaatgtggagcaagatgagttgcagcaagtcatacgggaggttggcatggatcctattagctgtgtaatactggaattatcaatgatatgcactggtggaggtgttatttgtgctttagaagatacttgctgttga

SEQ ID NO: 525 - DNA, 1110 bp, Homo sapiens;
atggacccccgcaaagtgaacgagcttcgggcctttgtgaaaatgtgtaagcaggatccgagcgttctgcacaccgaggaaatgcgcttcctgagggagtgggtggagagcatgggtggtaaagtaccacctgctactcagaaagctaaatcagaagaaaataccaaggaagaaaaacctgatagtaagaaggtggaggaagacttaaaggcagacgaaccatcaagtgaggaaagtgatctagaaattgataaagaaggtgtgattgaaccagacactgatgctcctcaagaaatgggagatgaaaatgcggagataacggaggagatgatggatcaggcaaatgataaaaaagtggctgctattgaagccctaaatgatggtgaactccagaaagccattgacttattcacagatgccatcaagctgaatcctcgcttggccattttgtatgccaagagggccagtgtcttcgtcaaattacagaagccaaatgctgccatccgagactgtgacagagccattgaaataaatcctgattcagctcagccttacaagtggcgggggaaagcacacagacttctaggccactgggaagaagcagcccatgatcttgcccttgcctgtaaattggattatgatgaagatgctagtgcaatgctgaaagaagttcaacctagggcacagaaaattgcagaacatcggagaaagtatgagcgaaaacgtgaagagcgagagatcaaagaaagaatagaacgagttaagaaggctcgagaagagcatgagagagcccagagggaggaagaagccagacgacagtcaggagctcagtatggctcttttccaggtggctttcctgggggaatgcctggtaattttcccggaggaatgcctggaatgggagggggcatgcctggaatggctggaatgcctggactcaatgaaattcttagtgatccagaggttcttgcagccatgcaggatccagaagttatggtggctttccaggatgtggctcagaacccagcaaatatgtcaaaataccagagcaacccaaaggttatgaatctcatcagtaaattgtcagccaaatttggaggtcaagcgtaa

SEQ ID NO: 526 - DNA, 1023 bp, Homo sapiens;
atggtgaccctgcggaagaggaccctgaaagtgctcaccttcctcgtgctcttcatcttcctcacctccttcttcctgaactactcccacaccatggtggccaccacctggttccccaagcagatggtcctggagctctccgagaacctgaagagactgatcaagcacaggccttgcacctgcacccactgcatcgggcagcgcaagctctcggcctggttcgatgagaggttcaaccagaccatgcagccgctgctgaccgcccagaacgcgctcttggaggacgacacctaccgatggtggctgaggctccagcgggagaagaagcccaataacttgaatgacaccatcaaggagctgttcagagtggtgcctgggaatgtggaccctatgctggagaagaggtcggtgggctgccggcgctgcgccgttgtgggcaactcgggcaacctgagggagtcttcttatgggcctgagatagacagtcacgactttgtcctcaggatgaacaaggcgcccacggcagggtttgaagctgatgttgggaccaagaccacccaccatctggtgtaccctgagagcttccgggagctgggagataatgtcagcatgatcctggtgcccttcaagaccatcgacttggagtgggtggtgagcgccatcaccacgggcaccatttcccacacctacatcccggttcctgcaaagatcagagtgaaacaggataagatcctgatctaccacccagccttcatcaagtatgtctttgacaactggctgcaagggcacgggcgatacccatctaccggcatcctctcggtcatcttctcaatgcatgtctgcgatgaggtggacttgtacggcttcggggcagacagcaaagggaactggcaccactactgggagaacaacccatccgcgggggcttttcgcaagacgggggtgcacgatgcagactttgagtctaacgtgacggccaccttggcctccatcaataaaatccggatcttcaaggggagatga

SEQ ID NO: 527 - DNA, 1578 bp, Homo sapiens;
atgcctttgttcaccgccaaccccttcgagcaagacgtggaaaaagccacgaatgagtacaacactacagaagattggagtcttattatggacatatgtgacaaagttggaagtactcctaatggagcgaaagattgcctaaaagccataatgaaaagggtaaatcataaggttccacatgttgctctgcaagcactaactcttcttggggcttgtgtggcaaactgtggaaagatatttcatttagaagtatgttcccgtgattttgcaacagaagtacgtgctgtgattaaaaataaggcacatcctaaagtatgtgaaaaactgaaatctttaatggtggagtggtcagaagaatttcagaaggaccctcagtttagtctgatatctgcaactattaaatctatgaaagaagaaggaattacttttcctccagcaggttctcagactgtctcagctgctgccaagaatggtacgtcatcgaacaaaaacaaagaggatgaagacatagctaaagctattgaattatcgctgcaagaacagaaacagcaacacacagaaacaaaatccttatatccatcttcagaaattcagttaaataataaggttgcacggaaagtgagagctttatatgattttgaagctgttgaggacaatgaactcacctttaaacatggtgaaataattattgttttggatgacagtgatgccaattggtggaaaggagaaaatcacagaggaataggacttttcccatccaattttgtaacaactaatttaaacatagagactgaggcagcggctgtggacaaattgaatgtaattgatgatgatgtggaggaaattaagaaatcagagcctgagcctgtttatatagatgaggataagatggatagagccctgcaggtacttcagagtatagatccaacagattcaaaaccagactcccaagaccttttggatttagaagatatctgccaacagatgggtccaatgatagatgaaaaacttgaagaaattgataggaagcattcagaattgtctgaattgaatgttaaagtcctggaagctctggaactatataacaaattggtgaatgaagcaccagtgtactcagtctattcaaagctccaccctccagcacattacccacctgcatcatctggggttccaatgcagacatatccagttcaatcacatggtggaaactatatgggtcagagcattcaccaagtaactgttgcccaaagctatagcctaggacccgatcaaattggtccactgagatctctgcctccaaatgtgaattcctcagtgacagcacagcctgctcaaacttcatatttaagcactggacaagacactgtttccaatcctacttatatgaaccagaactctaacctacagtcagctactggtacaactgcttacacacagcaaatggggatgtctgtggatatgtcatcttatcagaacactacttccaatttgcctcaactggcaggctttccggtgacagttccagctcatccagttgcacagcagcacacaaattaccatcagcagcctctcctttag

SEQ ID NO: 528 - DNA, 2253 bp, Homo sapiens;
atgtctcagtggtacgaacttcagcagcttgactcaaaattcctggagcaggttcaccagctttatgatgacagttttcccatggaaatcagacagtacctggcacagtggttagaaaagcaagactgggagcacgctgccaatgatgtttcatttgccaccatccgttttcatgacctcctgtcacagctggatgatcaatatagtcgcttttctttggagaataacttcttgctacagcataacataaggaaaagcaagcgtaatcttcaggataattttcaggaagacccaatccagatgtctatgatcatttacagctgtctgaaggaagaaaggaaaattctggaaaacgcccagagatttaatcaggctcagtcggggaatattcagagcacagtgatgttagacaaacagaaagagcttgacagtaaagtcagaaatgtgaaggacaaggttatgtgtatagagcatgaaatcaagagcctggaagatttacaagatgaatatgacttcaaatgcaaaaccttgcagaacagagaacacgagaccaatggtgtggcaaagagtgatcagaaacaagaacagctgttactcaagaagatgtatttaatgcttgacaataagagaaaggaagtagttcacaaaataatagagttgctgaatgtcactgaacttacccagaatgccctgattaatgatgaactagtggagtggaagcggagacagcagagcgcctgtattggggggccgcccaatgcttgcttggatcagctgcagaactggttcactatagttgcggagagtctgcagcaagttcggcagcagcttaaaaagttggaggaattggaacagaaatacacctacgaacatgaccctatcacaaaaaacaaacaagtgttatgggaccgcaccttcagtcttttccagcagctcattcagagctcgtttgtggtggaaagacagccctgcatgccaacgcaccctcagaggccgctggtcttgaagacaggggtccagttcactgtgaagttgagactgttggtgaaattgcaagagctgaattataatttgaaagtcaaagtcttatttgataaagatgtgaatgagagaaatacagtaaaaggatttaggaagttcaacattttgggcacgcacacaaaagtgatgaacatggaggagtccaccaatggcagtctggcggctgaatttcggcacctgcaattgaaagaacagaaaaatgctggcaccagaacgaatgagggtcctctcatcgttactgaagagcttcactcccttagttttgaaacccaattgtgccagcctggtttggtaattgacctcgagacgacctctctgcccgttgtggtgatctccaacgtcagccagctcccgagcggttgggcctccatcctttggtacaacatgctggtggcggaacccaggaatctgtccttcttcctgactccaccatgtgcacgatgggctcagctttcagaagtgctgagttggcagttttcttctgtcaccaaaagaggtctcaatgtggaccagctgaacatgttgggagagaagcttcttggtcctaacgccagccccgatggtctcattccgtggacgaggttttgtaaggaaaatataaatgataaaaattttcccttctggctttggattgaaagcatcctagaactcattaaaaaacacctgctccctctctggaatgatgggtgcatcatgggcttcatcagcaaggagcgagagcgtgccctgttgaaggaccagcagccggggaccttcctgctgcggttcagtgagagctcccgggaaggggccatcacattcacatgggtggagcggtcccagaacggaggcgaacctgacttccatgcggttgaaccctacacgaagaaagaactttctgctgttactttccctgacatcattcgcaattacaaagtcatggctgctgagaatattcctgagaatcccctgaagtatctgtatccaaatattgacaaagaccatgcctttggaaagtattactccaggccaaaggaagcaccagagccaatggaacttgatggccctaaaggaactggatatatcaagactgagttgatttctgtgtctgaagttcacccttctagacttcagaccacagacaacctgctccccatgtctcctgaggagtttgacgaggtgtctcggatagtgggctctgtagaattcgacagtatgatgaacacagtatag

SEQ ID NO: 529 - DNA, 2385 bp, Homo sapiens;
atggcgggctggatccaggcccagcagctgcagggagacgcgctgcgccagatgcaggtgctgtacggccagcacttccccatcgaggtccggcactacttggcccagtggattgagagccagccatgggatgccattgacttggacaatccccaggacagagcccaagccacccagctcctggagggcctggtgcaggagctgcagaagaaggcggagcaccaggtgggggaagatgggtttttactgaagatcaagctggggcactacgccacgcagctccagaaaacatatgaccgctgccccctggagctggtccgctgcatccggcacattctgtacaatgaacagaggctggtccgagaagccaacaattgcagctctccggctgggatcctggttgacgccatgtcccagaagcaccttcagatcaaccagacatttgaggagctgcgactggtcacgcaggacacagagaatgagctgaagaaactgcagcagactcaggagtacttcatcatccagtaccaggagagcctgaggatccaagctcagtttgcccagctggcccagctgagcccccaggagcgtctgagccgggagacggccctccagcagaagcaggtgtctctggaggcctggttgcagcgtgaggcacagacactgcagcagtaccgcgtggagctggccgagaagcaccagaagaccctgcagctgctgcggaagcagcagaccatcatcctggatgacgagctgatccagtggaagcggcggcagcagctggccgggaacggcgggccccccgagggcagcctggacgtgctacagtcctggtgtgagaagttggccgagatcatctggcagaaccggcagcagatccgcagggctgagcacctctgccagcagctgcccatccccggcccagtggaggagatgctggccgaggtcaacgccaccatcacggacattatctcagccctggtgaccagcacattcatcattgagaagcagcctcctcaggtcctgaagacccagaccaagtttgcagccaccgtacgcctgctggtgggcgggaagctgaacgtgcacatgaatcccccccaggtgaaggccaccatcatcagtgagcagcaggccaagtctctgcttaaaaatgagaacacccgcaacgagtgcagtggtgagatcctgaacaactgctgcgtgatggagtaccaccaagccacgggcaccctcagtgcccacttcaggaacatgtcactgaagaggatcaagcgtgctgaccggcggggtgcagagtccgtgacagaggagaagttcacagtcctgtttgagtctcagttcagtgttggcagcaatgagcttgtgttccaggtgaagactctgtccctacctgtggttgtcatcgtccacggcagccaggaccacaatgccacggctactgtgctgtgggacaatgcctttgctgagccgggcagggtgccatttgccgtgcctgacaaagtgctgtggccgcagctgtgtgaggcgctcaacatgaaattcaaggccgaagtgcagagcaaccggggcctgaccaaggagaacctcgtgttcctggcgcagaaactgttcaacaacagcagcagccacctggaggactacagtggcctgtccgtgtcctggtcccagttcaacagggagaacttgccgggctggaactacaccttctggcagtggtttgacggggtgatggaggtgttgaagaagcaccacaagccccactggaatgatggggccatcctaggttttgtgaataagcaacaggcccacgacctgctcatcaacaagcccgacgggaccttcttgttgcgctttagtgactcagaaatcgggggcatcaccatcgcctggaagtttgactccccggaacgcaacctgtggaacctgaaaccattcaccacgcgggatttctccatcaggtccctggctgaccggctgggggacctgagctatctcatctatgtgtttcctgaccgccccaaggatgaggtcttctccaagtactacactcctgtgctggctaaagctgttgatggatatgtgaaaccacagatcaagcaagtggtccctgagtttgtgaatgcatctgcagatgctgggggcagcagcgccacgtacatggaccaggccccctccccagctgtgtgcccccaggctccctataacatgtacccacagaaccctgaccatgtactcgatcaggatggagaattcgacctggatgagaccatggatgtggccaggcacgtggaggaactcttacgccgaccaatggacagtcttgactcccgcctctcgccccctgccggtcttttcacctctgccagaggctccctctcatga

SEQ ID NO: 530 - DNA, 2364 bp, Homo sapiens;
atggctgtgtggatacaagctcagcagctccaaggagaagcccttcatcagatgcaagcgttatatggccagcattttcccattgaggtgcggcattatttatcccagtggattgaaagccaagcatgggactcagtagatcttgataatccacaggagaacattaaggccacccagctcctggagggcctggtgcaggagctgcagaagaaggcagagcaccaggtgggggaagatgggtttttactgaagatcaagctggggcactatgccacacagctccagaacacgtatgaccgctgccccatggagctggtccgctgcatccgccatatattgtacaatgaacagaggttggtccgagaagccaacaatggtagctctccagctggaagccttgctgatgccatgtcccagaaacacctccagatcaaccagacgtttgaggagctgcgactggtcacgcaggacacagagaatgagttaaaaaagctgcagcagactcaggagtacttcatcatccagtaccaggagagcctgaggatccaagctcagtttggcccgctggcccagctgagcccccaggagcgtctgagccgggagacggccctccagcagaagcaggtgtctctggaggcctggttgcagcgtgaggcacagacactgcagcagtaccgcgtggagctggccgagaagcaccagaagaccctgcagctgctgcggaagcagcagaccatcatcctggatgacgagctgatccagtggaagcggcggcagcagctggccgggaacggcgggccccccgagggcagcctggacgtgctacagtcctggtgtgagaagttggccgagatcatctggcagaaccggcagcagatccgcagggctgagcacctctgccagcagctgcccatccccggcccagtggaggagatgctggccgaggtcaacgccaccatcacggacattatctcagccctggtgaccagcacgttcatcattgagaagcagcctcctcaggtcctgaagacccagaccaagtttgcagccactgtgcgcctgctggtgggcgggaagctgaacgtgcacatgaaccccccccaggtgaaggccaccatcatcagtgagcagcaggccaagtctctgctcaagaacgagaacacccgcaatgattacagtggcgagatcttgaacaactgctgcgtcatggagtaccaccaagccacaggcacccttagtgcccacttcaggaatatgtccctgaaacgaattaagaggtcagaccgtcgtggggcagagtcggtgacagaagaaaaatttacaatcctgtttgaatcccagttcagtgttggtggaaatgagctggtttttcaagtcaagaccctgtccctgccagtggtggtgatcgttcatggcagccaggacaacaatgcgacggccactgttctctgggacaatgcttttgcagagcctggcagggtgccatttgccgtgcctgacaaagtgctgtggccacagctgtgtgaggcgctcaacatgaaattcaaggccgaagtgcagagcaaccggggcctgaccaaggagaacctcgtgttcctggcgcagaaactgttcaacaacagcagcagccacctggaggactacagtggcctgtctgtgtcctggtcccagttcaacagggagaatttaccaggacggaattacactttctggcaatggtttgacggtgtgatggaagtgttaaaaaaacatctcaagcctcattggaatgatggggccattttggggtttgtaaacaagcaacaggcccatgacctactcattaacaagccagatgggaccttcctcctgagattcagtgactcagaaattggcggcatcaccattgcttggaagtttgattctcaggaaagaatgttttggaatctgatgccttttaccaccagagacttctccattcggtccctagccgaccgcttgggagacttgaattaccttatctacgtgtttcctgatcggccaaaagatgaagtatactccaaatactacacaccagttccctgcgagtctgctactgctaaagctgttgatggatacgtgaagccacagatcaagcaagtggtccctgagtttgtgaacgcatctgcagatgccgggggcggcagcgccacgtacatggaccaggccccctccccagctgtgtgtccccaggctcactataacatgtacccacagaaccctgactcagtccttgacaccgatggggacttcgatctggaggacacaatggacgtagcgcggcgtgtggaggagctcctgggccggccaatggacagtcagtggatcccgcacgcacaatcgtga

SEQ ID NO: 531 - DNA, 1395 bp, Homo sapiens;
atggcaatgacggcagggactacaacaacctttcctatgagcaaccatacccgggaaagagtgactgtagccaagctcacattggagaatttttatagcaacctaattttacagcatgaagagagagaaaccaggcagaagaaattagaagtggccatggaagaagaaggattagcagatgaagagaaaaagttacgtcgatcacaacacgctcgcaaagaaacagagttcttacggctcaaaaggaccagacttggcttggatgactttgagtctctgaaagttataggaagaggagcttttggagaggtgcggttggtccagaagaaagatacaggccatatctatgcaatgaagatattgagaaagtctgatatgcttgaaaaagagcaggtggcccatatccgagcagaaagagatattttggtagaagcagatggtgcctgggtggtgaagatgttttacagttttcaggataagaggaatctttatctaatcatggaatttctccctggaggtgacatgatgacattgctaatgaagaaagacaccttgacagaagaggaaacacagttctacatttcagagactgttctggcaatagatgcgatccaccagttgggtttcatccatcgggatattaagccagacaaccttttattggatgccaagggtcatgtaaaattatctgattttggtttatgtacgggattaaagaaagctcacaggactgaattttatagaaatctcacacacaacccaccaagtgacttctcatttcagaacatgaactcaaagaggaaagcagaaacttggaagaagaacaggagacaactggcatattccacagttgggacaccagattacattgctccagaagtattcatgcagactggttacaacaaattgtgtgactggtggtctttgggagtgattatgtatgaaatgctaataggatatccacctttctgctctgaaacacctcaagaaacgtacagaaaagtgatgaactggaaagaaactctggtatttcctccagaggtacctatatctgagaaagccaaggacttaattctcagattttgtattgattctgaaaacagaattggaaatagtggagtagaagaaataaaaggtcatcccttttttgaaggtgtcgactgggagcacataagggaaaggccagcagcaatccctatagaaatcaaaagcattgatgatacttcaaattttgatgacttccctgaatctgatattttacaaccagtgccaaataccacagaaccggactacaaatccaaagactgggtttttctcaattatacctataaaaggtttgaagggttgactcaacgtggctctatccccacctacatgaaagctgggaagttatga

SEQ ID NO: 532 - DNA, 750 bp, Homo sapiens;
atgtctctcgaagaccccttttttgtagtccgaggcgaggtgcagaaggcggtgaacacggcccgcgggctgtaccagcgctggtgcgagctcctgcaggaaagcgcggcggtcggacgcgaggagctggactggacgaccaatgagctgcggaatggcctgcgcagcatcgagtgggacctcgaggacctggaagagaccatcggtatagtggaagccaacccaggcaagttcaagctcccagccggggacctgcaggagagaaaggtgttcgtggagcggatgcgagaggcagtccaggaaatgaaggaccatatggtcagcccaacagccgtagcatttttggagaggaataacagagagatactcgcaggcaagccagctgcccagaagtcacccagcgacctgctggatgccagcgcagtctcggccacatctcgctacatcgaggagcagcaggccacacagcagctgatcatggatgaacaggatcaacagctggagatggtgtctgggagcatccaggttctgaagcacatgtccggccgcgttggagaagagctggacgagcagggcatcatgctggatgccttcgcccaagagatggaccacacccagtcccgcatggacggggtcctcaggaagttggccaaagtatcccacatgacgagtgaccgccgacagtggtgtgccatcgccgtgctagtgggggtgcttctcctcgttctcatcttactattctctctctga

SEQ ID NO: 533 - DNA, 870 bp, Homo sapiens;
atgaaggaccgtctggagcagctgaaggccaagcagctgacacaggatgatgatactgatgcggttgagattgctatcgacaacacggcttttatggacgagttcttttctgagattgaggaaactcggcttaacattgacaagatctcagaacatgtagaggaggctaagaaactctacagtatcattctctctgcaccgattccagagccaaaaaccaaggatgacctagagcagctcacgactgagattaagaaaagggccaacaacgtccggaacaaactgaagagcatggagaagcatattgaagaagatgaggtcaggtcatcggcagaccttcggattcggaaatcccagcactctgtcctttctcggaagtttgtggaggtgatgaccaaatacaatgaagctcaagtggacttccgagaacgcagcaaagggcgaatccagcggcagctcgaaattactggcaaaaagacaaccgatgaggagctggaggagatgttggagagtggcaacccggccatcttcacttctgggatcattgactcacagatttccaagcaagccctcagtgagattgagggacgacacaaggacattgtgaggctggagagcagcatcaaggagcttcacgacatgtttatggacatcgccatgctggtggagaatcagggtgagatgttagataacatagagttgaatgtcatgcacacagtggaccacgtggagaaggcacgagatgaaacgaaaaaagctgtgaaataccagagtcaggcccggaagaaattgataattatcattgtgctagtagttgtgttgctgggcattttagcattgattattggactttccgttgggctgaattaa

SEQ ID NO: 534 - DNA, 768 bp, Homo sapiens;
atgtccatggaggaccccttctttgtggtgaaaggagaggtacagaaagcagtcaacactgcccagggattgtttcagagatggacagagctcctccaggacccctccacagcaacaagggaagaaatcgactggaccaccaacgagctgagaaataacctccggagcatagagtgggatctagaggaccttgatgaaaccatcagcatagttgaagcaaatcctagaaaatttaaccttgatgcaactgaattgagtataagaaaagccttcattacaagtactcggcaagttgtcagggacatgaaagatcagatgtcaacttcatctgtgcaggcattagctgaaagaaaaaatagacaggcactgctgggagacagtggcagccagaactggagcactggaacaacagataaatatgggcgtctggaccgagagctccagagagccaattctcatttcattgaggagcagcaggcacagcagcagttgatcgtggaacagcaggatgagcagttggagctggtctctggcagcatcggggtgctgaagaacatgtcccagcgcatcggaggggagctggaggaacaggcagttatgttggaagatttctctcacgaattggagagcactcagtcccggctggacaatgtgatgaagaaacttgcaaaagtatctcatatgaccagtgatcggcgccaatggtgtgccatagccatcctctttgcagtcctgttggttgtgctcatcctcttcttagtgctgtga

SEQ ID NO: 535 - DNA, 780 bp, Homo sapiens;
atggcgcccaacatctacttggttcgccagcggatcagtcgactcggccagaggatgtccggcttccagatcaacctcaacccgctcaaggagccactcggcttcatcaaggtcctcgagtggattgcttctatctttgcttttgccacctgtggaggttttaagggccaaacagaaattcaagtgaattgtcctcctgcagttactgagaataaaactgttacagctacttttggttatccattcaggttgaatgaggcatcatttcagccacctccaggtgtaaacatatgtgatgtaaattggaaagattacgtcctcataggcgattactcttcttctgcacaattctatgttacctttgcagtctttgtgttcctgtactgcattgctgcccttctgctttatgttggctacacgagtctgtatctggatagtcgtaaacttcctatgatagactttgttgttacacttgttgccacttttttgtggttggtgagcacttcagcctgggctaaagctctgacagatattaaaatagctactggtcacaatattattgatgaacttccgccttgtaagaagaaagcagtactgtgttactttggctctgtgaccagtatgggatccctaaatgtatctgtgatatttggctttctaaatatgatactctggggaggaaatgcttggtttgtgtacaaggagaccagcctacacagtccatcaaatacatctgcccctcatagccaaggaggtattccacctcctaccggaatataa

SEQ ID NO: 536 - DNA, 2427 bp, Homo sapiens;
atggctgagcttctcgccagcgcaggatcagcctgttcctgggactttccgagagccccgccctcgttccctcccccagccgccagtaggggaggactcggcggtacccggagcttcaggccccaccggggcgcggagagtcccaggcccggccgggaccgggacggcgtccgagtgccaatggctagctctaggtgtcccgctccccgcgggtgccgctgcctccccggagcttctctcgcatggctggggacagtactgctacttctcgccgactgggtgctgctccggaccgcgctgccccgcatattctccctgctggtgcccaccgcgctgccactgctccgggtctgggcggtgggcctgagccgctgggccgtgctctggctgggggcctgcggggtcctcagggcaacgggtggctccaagagcgaaaacgcaggtgcccagggctggctggctgctttgaagccattagctgcggcactgggcttggccctgccgggacttgccttgttccgagagctgatctcatggggagcccccgggtccgcggatagcaccaggctactgcactggggaagtcaccctaccgccttcgttgtcagttatgcagcggcactgcccgcagcagccctgtggcacaaactcgggagcctctgggtgcccggcggtcagggcggctctggaaaccctgtgcgtcggcttctaggctgcctgggctcggagacgcgccgcctctcgctgttcctggtcctggtggtcctctcctctcttggggagatggccattccattctttacgggccgcctcactgactggattctacaagatggctcagccgataccttcactcgaaacttaactctcatgtccattctcaccatagccagtgcagtgctggagttcgtgggtgacgggatctataacaacaccatgggccacgtgcacagccacttgcagggagaggtgtttggggctgtcctgcgccaggagacggagtttttccaacagaaccagacaggtaacatcatgtctcgggtaacagaggacacgtccaccctgagtgattctctgagtgagaatctgagcttatttctgtggtacctggtgcgaggcctatgtctcttggggatcatgctctggggatcagtgtccctcaccatggtcaccctgatcaccctgcctctgcttttccttctgcccaagaaggtgggaaaatggtaccagttgctggaagtgcaggtgcgggaatctctggcaaagtccagccaggtggccattgaggctctgtcggccatgcctacagttcgaagctttgccaacgaggagggcgaagcccagaagtttagggaaaagctgcaagaaataaagacactcaaccagaaggaggctgtggcctatgcagtcaactcctggaccactagtatttcaggtatgctgctgaaagtgggaatcctctacattggtgggcagctggtgaccagtggggctgtaagcagtgggaaccttgtcacatttgttctctaccagatgcagttcacccaggctgtggaggtactgctctccatctaccccagagtacagaaggctgtgggctcctcagagaaaatatttgagtacctggaccgcacccctcgctgcccacccagtggtctgttgactcccttacacttggagggccttgtccagttccaagatgtctcctttgcctacccaaaccgcccagatgtcttagtgctacaggggctgacattcaccctacgccctggcgaggtgacggcgctggtgggacccaatgggtctgggaagagcacagtggctgccctgctgcagaatctgtaccagcccaccgggggacagctgctgttggatgggaagccccttccccaatatgagcaccgctacctgcacaggcaggtggctgcagtgggacaagagccacaggtatttggaagaagtcttcaagaaaatattgcctatggcctgacccagaagccaactatggaggaaatcacagctgctgcagtaaagtctggggcccatagtttcatctctggactccctcagggctatgacacagaggtagacgaggctgggagccagctgtcagggggtcagcgacaggcagtggcgttggcccgagcattgatccggaaaccgtgtgtacttatcctggatgatgccaccagtgccctggatgcaaacagccagttacaggtggagcagctcctgtacgaaagccctgagcggtactcccgctcagtgcttctcatcacccagcacctcagcctggtggagcaggctgaccacatcctctttctggaaggaggcgctatccgggaggggggaacccaccagcagctcatggagaaaaaggggtgctactgggccatggtgcaggctcctgcagatgctccagaatga

SEQ ID NO: 537 - DNA, 1728 bp, Homo sapiens;
atgtctcatgcggccgaaccagctcgggatggcgtagaggccagcgcggagggccctcgagccgtgttcgtgctgttggaggagcgcaggccggccgactcggctcagctgctcagcctgaactctttgcttccggaatccgggattgttgctgacatagaattagaaaacgtccttgatcctgacagcttctacgagctcaaaagccaacccttaccccttcgctcaagcctcccaatatcactgcaggccacaccagccaccccagctacactctctgcatcgtcttctgcagggggctccaggacccctgccatgtcgtcatcttcttcatcgagggtcttgctgcggcagcagctaatgcgggcccaggcgcaggagcaggagaggcgtgagcgtcgggaacaggccgccgcggctcccttccccagtcctgcacctgcctctcctgccatctctgtggttggcgtctctgctgggggccacacattgagccgtccaccccctgctcaggtgcccagggaggtgctcaaggtgcagacccatctggagaacccaacgcgctaccacctgcagcaggcgcgccggcagcaggtgaaacagtacctgtccaccacactcgggcccaagctggcttcccaggccctcaccccaccgccggggcccgcaagtgcccagccactgcctgcccctgaggctgcccacactaccggccccacaggcagtgcgcccaacagccccatggcgctgctcaccatcgggtccagctcagagaaggagattgatgatgtcattgatgagatcatcagcctggagtccagttacaatgatgaaatgctcagctatctgcccggaggcaccacaggactgcagctccccagcacgctgcctgtgtcagggaatctgcttgatgtgtacagtagtcaaggcgtggccacaccagccatcactgtcagcaactcctgcccagctgagctgcccaacatcaaacgggagatctctgagaccgaggcaaaggcccttttgaaggaacggcagaagaaagacaatcacaacctaattgagcgtcgcaggcgattcaacattaacgacaggatcaaggaactgggcactctcatccctaagtccagtgacccggagatgcgctggaacaagggcaccatcctgaaggcctctgtggattatatccgcaagctgcagaaggagcagcagcgctccaaagacctggagagccggcagcgatccctggagcaggccaaccgcagcctgcagctccgaattcaggaactagaactgcaggcccagatccatggcctgccagtacctcccactccagggctgctttccttggccacgacttcggcttctgacagcctcaagccagagcagctggacattgaggaggagggcaggccaggcgcagcaacgttccatgtaggggggggacctgcccagaatgctccccatcagcagccccctgcaccgccctcagatgcccttctggacctgcactttcccagcgaccacctgggggacctgggagaccccttccacctggggctggaggacattctgatggaggaggaggagggggtggtgggaggactgtcggggggtgccctgtccccactgcgggctgcctccgatcccctgctctcttcagtgtcccctgctgtctccaaggccagcagccgccgcagcagcttcagcatggaagaggagtcctga

SEQ ID NO: 538 - DNA, 1431 bp, Homo sapiens;
atggcgtcacgcatagggttgcgcatgcagctcatgcgggagcaggcgcagcaggaggagcagcgggagcgcatgcagcaacaggctgtcatgcattacatgcagcagcagcagcagcagcaacagcagcagctcggagggccgcccaccccggccatcaatacccccgtccacttccagtcgccaccacctgtgcctggggaggtgttgaaggtgcagtcctacctggagaatcccacatcctaccatctgcagcagtcgcagcatcagaaggtgcgggagtacctgtccgagacctatgggaacaagtttgctgcccacatcagcccagcccagggctctccgaaacccccaccagccgcctccccaggggtgcgagctggacacgtgctgtcctcctccgctggcaacagtgctcccaatagccccatggccatgctgcacattggctccaaccctgagagggagttggatgatgtcattgacaacattatgcgtctggacgatgtccttggctacatcaatcctgaaatgcagatgcccaacacgctacccctgtccagcagccacctgaatgtgtacagcagcgacccccaggtcacagcctccctggtgggcgtcaccagcagctcctgccctgcggacctgacccagaagcgagagctcacagatgctgagagcagggccctggccaaggagcggcagaagaaagacaatcacaacttaattgaaaggagacgaaggttcaacatcaatgaccgcatcaaggagttgggaatgctgatccccaaggccaatgacctggacgtgcgctggaacaagggcaccatcctcaaggcctctgtggattacatccggaggatgcagaaggacctgcaaaagtccagggagctggagaaccactctcgccgcctggagatgaccaacaagcagctctggctccgtatccaggagctggagatgcaggctcgagtgcacggcctccctaccacctccccgtccggcatgaacatggctgagctggcccagcaggtggtgaagcaggagctgcctagcgaagagggcccaggggaggccctgatgctgggggctgaggtccctgaccctgagccactgccagctctgcccccgcaagccccgctgcccctgcccacccagccaccatccccattccatcacctggacttcagccacagcctgagctttgggggcagggaggacgagggtcccccgggctaccccgaacccctggcgccggggcatggctccccattccccagcctgtccaagaaggatctggacctcatgctcctggacgactcactgctaccgctggcctctgatccacttctgtccaccatgtcccccgaggcctccaaggccagcagccgccggagcagcttcagcatggaggagggcgatgtgctgtga

SEQ ID NO: 539 - DNA, 2052 bp, Homo sapiens;
atggcgctcttcgtgcggctgctggctctcgccctggctctggccctgggccccgccgcgaccctggcgggtcccgccaagtcgccctaccagctggtgctgcagcacagcaggctccggggccgccagcacggccccaacgtgtgtgctgtgcagaaggttattggcactaataggaagtacttcaccaactgcaagcagtggtaccaaaggaaaatctgtggcaaatcaacagtcatcagctacgagtgctgtcctggatatgaaaaggtccctggggagaagggctgtccagcagccctaccactctcaaacctttacgagaccctgggagtcgttggatccaccaccactcagctgtacacggaccgcacggagaagctgaggcctgagatggaggggcccggcagcttcaccatcttcgcccctagcaacgaggcctgggcctccttgccagctgaagtgctggactccctggtcagcaatgtcaacattgagctgctcaatgccctccgctaccatatggtgggcaggcgagtcctgactgatgagctgaaacacggcatgaccctcacctctatgtaccagaattccaacatccagatccaccactatcctaatgggattgtaactgtgaactgtgcccggctgctgaaagccgaccaccatgcaaccaacggggtggtgcacctcatcgataaggtcatctccaccatcaccaacaacatccagcagatcattgagatcgaggacacctttgagacccttcgggctgctgtggctgcatcagggctcaacacgatgcttgaaggtaacggccagtacacgcttttggccccgaccaatgaggccttcgagaagatccctagtgagactttgaaccgtatcctgggcgacccagaagccctgagagacctgctgaacaaccacatcttgaagtcagctatgtgtgctgaagccatcgttgcggggctgtctgtagagaccctggagggcacgacactggaggtgggctgcagcggggacatgctcactatcaacgggaaggcgatcatctccaataaagacatcctagccaccaacggggtgatccactacattgatgagctactcatcccagactcagccaagacactatttgaattggctgcagagtctgatgtgtccacagccattgaccttttcagacaagccggcctcggcaatcatctctctggaagtgagcggttgaccctcctggctcccctgaattctgtattcaaagatggaacccctccaattgatgcccatacaaggaatttgcttcggaaccacataattaaagaccagctggcctctaagtatctgtaccatggacagaccctggaaactctgggcggcaaaaaactgagagtttttgtttatcgtaatagcctctgcattgagaacagctgcatcgcggcccacgacaagagggggaggtacgggaccctgttcacgatggaccgggtgctgacccccccaatggggactgtcatggatgtcctgaagggagacaatcgctttagcatgctggtagctgccatccagtctgcaggactgacggagaccctcaaccgggaaggagtctacacagtctttgctcccacaaatgaagccttccgagccctgccaccaagagaacggagcagactcttgggagatgccaaggaacttgccaacatcctgaaataccacattggtgatgaaatcctggttagcggaggcatcggggccctggtgcggctaaagtctctccaaggtgacaagctggaagtcagcttgaaaaacaatgtggtgagtgtcaacaaggagcctgttgccgagcctgacatcatggccacaaatggcgtggtccatgtcatcaccaatgttctgcagcctccagccaacagacctcaggaaagaggggatgaacttgcagactctgcgcttgagatcttcaaacaagcatcagcgttttccagggcttcccagaggtctgtgcgactagcccctgtctatcaaaagttattagagaggatgaagcattag

SEQ ID NO: 540 - DNA, 1704 bp, Homo sapiens;
atgggtcgggggctgctcaggggcctgtggccgctgcacatcgtcctgtggacgcgtatcgccagcacgatcccaccgcacgttcagaagtcggttaataacgacatgatagtcactgacaacaacggtgcagtcaagtttccacaactgtgtaaattttgtgatgtgagattttccacctgtgacaaccagaaatcctgcatgagcaactgcagcatcacctccatctgtgagaagccacaggaagtctgtgtggctgtatggagaaagaatgacgagaacataacactagagacagtttgccatgaccccaagctcccctaccatgactttattctggaagatgctgcttctccaaagtgcattatgaaggaaaaaaaaaagcctggtgagactttcttcatgtgttcctgtagctctgatgagtgcaatgacaacatcatcttctcagaagaatataacaccagcaatcctgacttgttgctagtcatatttcaagtgacaggcatcagcctcctgccaccactgggagttgccatatctgtcatcatcatcttctactgctaccgcgttaaccggcagcagaagctgagttcaacctgggaaaccggcaagacgcggaagctcatggagttcagcgagcactgtgccatcatcctggaagatgaccgctctgacatcagctccacgtgtgccaacaacatcaaccacaacacagagctgctgcccattgagctggacaccctggtggggaaaggtcgctttgctgaggtctataaggccaagctgaagcagaacacttcagagcagtttgagacagtggcagtcaagatctttccctatgaggagtatgcctcttggaagacagagaaggacatcttctcagacatcaatctgaagcatgagaacatactccagttcctgacggctgaggagcggaagacggagttggggaaacaatactggctgatcaccgccttccacgccaagggcaacctacaggagtacctgacgcggcatgtcatcagctgggaggacctgcgcaagctgggcagctccctcgcccgggggattgctcacctccacagtgatcacactccatgtgggaggcccaagatgcccatcgtgcacagggacctcaagagctccaatatcctcgtgaagaacgacctaacctgctgcctgtgtgactttgggctttccctgcgtctggaccctactctgtctgtggatgacctggctaacagtgggcaggtgggaactgcaagatacatggctccagaagtcctagaatccaggatgaatttggagaatgttgagtccttcaagcagaccgatgtctactccatggctctggtgctctgggaaatgacatctcgctgtaatgcagtgggagaagtaaaagattatgagcctccatttggttccaaggtgcgggagcacccctgtgtcgaaagcatgaaggacaacgtgttgagagatcgagggcgaccagaaattcccagcttctggctcaaccaccagggcatccagatggtgtgtgagacgttgactgagtgctgggaccacgacccagaggcccgtctcacagcccagtgtgtggcagaacgcttcagtgagctggagcatctggacaggctctcggggaggagctgctcggaggagaagattcctgaagacggctccctaaacactaccaaatag

SEQ ID NO: 541 - DNA, 1314 bp, Homo sapiens;
atgcggttcgtggttgccttggtcctcctgaacgtcgcagcggcgggagccgtgccgctcttggccaccgaaagcgtcaagcaagaagaagctggagtacggccttctgcaggaaacgtctccacccaccccagcttgagccaacggcctggaggctctaccaagtcgcatccggagccgcagactccaaaagacagccctagcaagtcgagtgcggaggcgcagaccccagaagacacccccaacaagtcgggtgcggaggcaaagacccaaaaagacagctccaacaagtcgggtgcggaggcaaagacccaaaaaggcagcactagcaagtcgggttcggaggcgcagaccacaaaagacagcactagtaagtcgcatccggagctgcagactccaaaagacagcactggcaaatcgggtgcggaggcgcagaccccagaagacagccccaacaggtcgggtgcggaggcaaagacccaaaaagacagccctagcaagtcaggttcggaggcgcagaccacaaaagatgtccctaataagtcgggtgcggacggccagaccccaaaagacggctccagcaagtcgggtgcggaggatcagaccccaaaagacgtccctaacaagtcgggtgcggagaagcagactccaaaagacggctctaacaagtccggtgcagaggagcagggcccaatagacgggcccagcaagtcgggtgcggaggagcagacctcaaaagacagccctaacaaggtggttccagagcagccttcccggaaagaccattccaagcccatctccaacccttctgataacaaggagctccccaaggctgacacaaaccagcttgctgacaaagggaagctttctcctcatgctttcaaaaccgaatctggggaggaaactgacctcatttctcccccgcaggaggaagttaagtcttcagagcctactgaggatgtggagcccaaagaggctgaagatgatgatacaggacccgaggagggctcaccgcccaaagaagagaaagaaaagatgtccggttctgcctccagtgagaaccgtgaagggacactttcggattccacgggtagcgagaaggatgacctttatccgaacggttctggaaatggcagcgcggagagcagccacttctttgcatatctggtgactgcagccattcttgtggctgtcctctatatcgctcatcacaacaagcggaagatcattgcttttgtcctggaaggaaaaagatctaaagtcacccggcggccaaaggccagtgactaccaacgtttggaccagaagtcctaa

SEQ ID NO: 542 - DNA, 4776 bp, Homo sapiens;
atgggaaacgcagaaagtcaacatgtagagcacgagttttatggagaaaagcatgccagcctggggcgcaagcacacttcccgctccctgcgcctctcgcacaagacgcggaggaccaggcacgcttcctcggggaaggtgatccacaggaactccgaagtgagcacccgatccagcagcacccccagcatcccccagtccctggctgaaaatggcctggagcccttctcccaagatggtaccctagaagacttcgggagccccatctgggtggaccgagtggacatgggcttgagacctgtgtcttacactgactcttctgtcactcccagcgtagacagcagcatcgtcctcacagcagcctctgtgcagagcatgccagacactgaggagagcaggctttacggggatgacgctacatatttggctgagggaggcaggaggcagcattcctatacatccaatgggcccactttcatggagacggcgagctttaagaagaaacgctccaaatctgcagacatctggcgggaggacagcctggaattctcactctctgatctgagccaagaacatttaacaagcaacgaagaaatcttgggttccgccgaagagaaggactgcgaggaggctcgggggatggaaacgcgggcgagtccgcggcagctcagcacctgtcagagagccaattccttgggtgacttgtatgctcagaaaaactctggagtgacagcaaacggggggccggggagcaaatttgcaggctactgtcggaatttggtgtctgatattcccaatcttgcaaaccataagatgccaccagctgctgctgaagagactcctccgtacagtaattataacacacttccctgtaggaaatctcactgtctctctgaaggtgccaccaacccacaaattagccatagcaacagcatgcaaggcagaagagctaaaacaactcaggatgttaatgcaggcgagggcagtgagtttgcagacagtgggattgaaggggccactaccgacacggacctcctgtccaggcgatctaatgccaccaactccagctactcacccaccacaggccgggcctttgtgggcagcgacagcggcagcagctccaccggggatgcggctcgtcagggggtgtacgagaacttccggcgggagctggagatgagcaccaccaacagcgagagcctggaggaggccggctcggcgcacagcgatgagcagagcagcggcaccctgagctctccgggccagtcggacatcctgctgaccgccgcacagggcacggtgcgcaaggccggcgccctggccgtcaagaacttcctggtgcacaagaagaacaagaaggtggagtcagccacccggaggaagtggaagcactactgggtgtccctgaaaggatgcacgctatttttctacgagagcgacggcaggtctgggatagaccacaacagcatccccaaacacgccgtctgggtggagaacagcattgtgcaggcggtgcctgagcaccccaagaaggactttgtcttctgcctcagcaattccctgggtgatgccttcctttttcagaccactagccagacggagcttgaaaactggatcaccgccatccactctgcctgcgccactgcggtcgcgaggcaccaccacaaggaagacacgctccgactcctgaaatcagagatcaaaaaactggaacagaagattgacatggatgaaaagatgaagaaaatgggtgaaatgcagctgtcttcagtcactgactcaaagaaaaagaaaacaatattagatcagatctttgtctgggagcaaaatctcgagcagttccaaatggacctgtttcgtttccgctgttatttagccagccttcagggtggggagctgccaaaccccaaaaggcttctcgcttttgcaagtcgaccaacgaaagtggccatgggccgccttggaatcttttcggtatcatcgtttcatgccctggtggcagcacgcactggtgaaactggagtgagaagacgtactcaggccatgtccagatccgcgagcaagcgaaggagcaggttttcttctctgtggggtctggatactacctccaaaaagaagcagggacggccaagcatcaatcaggtgtttggagagggaaccgaagctgtaaagaaatctttagagggaatatttgatgacattgttccagatggcaagagggagaaagaagtggtcttacctaacgttcaccagcacaaccctgactgcgacatttgggtccacgagtatttcactccatcctggttctgtctgcccaataatcagcctgccctgacggtcgtccggccaggcgacactgcacgggacaccctggagctgatttgcaagacacatcaactggatcattctgctcattacctgcgcctgaaatttctaatagaaaacaaaatgcagctctatgttccacagcccgaggaagacatctatgagctgctgtacaaagaaattgaaatctgtccaaaagtcactcagagcatccacattgagaagtcagatacagctgctgatacttacgggttttcactttcttctgtggaagaagatggtattcgaaggctgtacgtgaatagtgtgaaggaaaccggtttagcttccaagaaaggcctgaaagcaggagatgagattcttgagatcaataatcgtgctgctgacgccctgaactcttctatgctcaaagatttcctctcacagccctcgctgggcctcctggtgaggacctaccccgagctggaggaaggagtggagctgctggaaagcccgccccaccgagtggacggccctgccgaccttggcgagagccccctcgcctttctcaccagcaacccagggcacagcctttgcagcgagcagggcagcagtgctgagaccgctccagaggagaccgaggggccagacttggaatcctcagatgagactgatcacagcagcaagagtacagaacaggtggccgcattttgccgcagtttgcatgagatgaacccctctgaccagagcccatctcctcaggactccacggggcctcagctggcgaccatgagacaactctcggatgcagataagctgcgcaaggtgatctgcgagctcctggagacggagcgcacctacgtgaaggatttaaactgtcttatggagagatacctaaagcctcttcaaaaagaaacttttctcacccaggatgagcttgacgtgctttttggaaatttaacggaaatggtagagtttcaagtagaattccttaaaactctagaagatggagtgagactggtacctgatttggaaaagcttgagaaggttgatcaatttaagaaagtgctgttctctctggggggatcattcctgtattatgctgaccgcttcaagctctacagtgccttctgcgccagccacacaaaagttcccaaggtcctggtgaaagccaagacagacacggctttcaaggcattcttggatgcccagaacccgaagcagcagcactcatccacgctggagtcgtacctcatcaagcccatccagaggatcctcaagtacccacttctgctcagggagctgttcgccctgaccgatgcggagagcgaggagcactaccacctggacgtggccatcaagaccatgaacaaggttgccagtcacatcaatgagatgcagaaaatccatgaagagtttggggctgtgtttgaccagctgattgctgaacagactggtgagaaaaaagaggttgcagatctgagcatgggagacctgcttttgcacactaccgtgatctggctgaacccgccggcctcgctgggcaagtggaaaaaggaaccagagttggcagcattcgtcttcaaaactgctgtggtccttgtgtataaagatggttccaaacagaagaagaaacttgtaggatctcacaggctttccatttatgaggactgggaccccttcagatttcgacacatgatccccacggaagcgctgcaggttcgagctttggcgagtgcagatgcagaggcaaatgccgtgtgtgaaattgtccatgtaaaatccgagtctgaagggaggccggagagggtctttcacttgtgctgcagctccccagagagccgaaaggatttcctaaaggctgtgcattcaatcctgcgtgataagcacagaagacagctcctcaaaaccgagagccttccctcatcccagcaatatgtcccttttggaggcaaaagattgtgtgcactgaagggggccaggccggccatgagcagggcagtgtctgccccaagcaagtctcttgggaggaggaggcggcggctggctcgaaacaggtttaccattgattctgatgccgtctccgcaagcagcccggagaaagagtcccagcagccccccggtggtggggacactgaccgatgggtagaggagcagtttgatcttgctcagtatgaggagcaagatgacatcaaggagacagacatcctcagtgacgatgatgagttctgtgagtccgtgaagggtgcctcagtggacagagacctgcaggagcggcttcaggccacctccatcagtcagcgggaaagaggccggaaaaccctggatagtcacgcgtcccgcatggcacagctcaagaagcaagctgccctgtcggggatcaatggaggcctggagagcgcaagcgaggaagtcatttgggttaggcgtgaagactttgccccctccaggaaactgaacactgagatctga

SEQ ID NO: 543 - DNA, 2319 bp, Homo sapiens;; identical to SEQ ID NO: 87

SEQ ID NO: 544 - DNA, 2322 bp, Homo sapiens;
atgattcgcgacctgagcaagatgtacccgcagaccagacacccagcaccgcatcagcctgctcaaccctttaaatttacaatttccgaatcctgtgatcggattaaggaagagtttcagtttttacaggctcaataccacagtctgaagctggaatgtgagaaactcgccagtgagaagacagagatgcagcggcattatgtcatgtattatgaaatgtcctatgggttgaatatagaaatgcacaagcaggcagagattgtcaagaggctgaatgctatctgtgcacaagtcattcctttcctgtcccaagagcaccagcaacaagtggtgcaggctgtggaacgggccaagcaggtgaccatggcagaactgaacgccatcattgggcaacaactccaggcccagcatttatcacatggacatggtctccccgtacctctgactccacacccttcagggctccagccccctgccattccacccatcggtagcagtgccgggcttctggccctctccagtgctctaggaggtcagtcccatcttccaattaaagatgagaagaagcaccatgacaatgatcaccaaagagacagagactccatcaagagctcttcagtatccccatcagccagtttccgaggtgctgagaagcacagaaactccgcagactactcctcagagagcaaaaagcagaaaactgaagaaaaggaaattgcagctcgttatgacagcgatggtgagaaaagtgatgacaacttggtggttgacgtttccaatgaggatccatcttcccctcgagggagcccagcacattcccccagagagaatggcctagacaagacacgcctgctcaagaaagatgccccgattagtccagcctctattgcatcttccagcagtactccctcctccaaatccaaagaacttagccttaatgaaaaatctactactcccgtctcaaagtccaatacccctactccacgaactgatgcgcccaccccaggcagtaactctactcccggattgaggcctgtacctggaaaaccaccaggagttgaccctttggcctcaagcctaaggaccccaatggcagtaccttgtccatatccaactccatttgggattgtgccccatgctggaatgaacggagagctgaccagccccggagcggcctacgctgggctccacaacatctcccctcagatgagcgcagctgctgccgccgccgctgctgctgctgcctatgggagatcaccagtggtgggatttgatccacaccatcacatgcgtgtgccagcaatacctccaaacctgacaggcattccaggaggaaaaccagcatactccttccatgttagcgcagatggtcagatgcagcctgtcccttttccacccgacgccctcatcggacctggaatcccccggcatgctcgccagatcaacaccctcaaccacggggaggtggtgtgcgcggtgaccatcagcaaccccacgagacacgtgtacacgggtgggaagggctgcgtcaaggtctgggacatcagccacccaggcaataagagtcctgtctcccagctcgactgtctgaacagggataactacatccgttcctgcagattgctccctgatggtcgcaccctaattgttggaggggaagccagtactttgtccatttgggacctggcggctccaaccccacgcatcaaggcagagctgacatcctcggcccccgcctgctatgccctggccatcagccccgattccaaggtctgcttctcatgctgcagcgacggcaacatcgctgtgtgggatctgcacaaccagaccttggtgaggcaattccagggccacacagatggagccagctgtattgacatttctaatgatggcaccaagctctggacaggtggtttggacaacacggtcaggtcctgggacctgcgcgaggggcggcagctgcagcagcacgacttcacctcccagatcttttctctgggctactgcccaactggagagtggcttgcagtggggatggagaacagcaatgtggaagttttgcatgtcaccaagccagacaaataccaactacatcttcatgagagctgtgtgctgtcgctcaagtttgcccattgtggcaaatggtttgtaagcactggaaaggacaaccttctgaatgcctggagaacaccttatggggccagtatattccagtccaaagaatcctcatcggtgcttagctgtgacatctccgtggacgacaaatacattgtcactggctctggggataagaaggccacagtttatgaagttatttattaa

SEQ ID NO: 545 - DNA, 2355 bp, Homo sapiens;
atgccacatactttgtggatggtgtgggtcttgggggtcatcatcagcctctccaaggaagaatcctccaatcaggcttctctgtcttgtgaccgcaatggtatctgcaagggcagctcaggatctttaaactccattccctcagggctcacagaagctgtaaaaagccttgacctgtccaacaacaggatcacctacattagcaacagtgacctacagaggtgtgtgaacctccaggctctggtgctgacatccaatggaattaacacaatagaggaagattctttttcttccctgggcagtcttgaacatttagacttatcctataattacttatctaatttatcgtcttcctggttcaagcccctttcttctttaacattcttaaacttactgggaaatccttacaaaaccctaggggaaacatctcttttttctcatctcacaaaattgcaaatcctgagagtgggaaatatggacaccttcactaagattcaaagaaaagattttgctggacttaccttccttgaggaacttgagattgatgcttcagatctacagagctatgagccaaaaagtttgaagtcaattcagaatgtaagtcatctgatccttcatatgaagcagcatattttactgctggagatttttgtagatgttacaagttccgtggaatgtttggaactgcgagatactgatttggacactttccatttttcagaactatccactggtgaaacaaattcattgattaaaaagtttacatttagaaatgtgaaaatcaccgatgaaagtttgtttcaggttatgaaacttttgaatcagatttctggattgttagaattagagtttgatgactgtacccttaatggagttggtaattttagagcatctgataatgacagagttatagatccaggtaaagtggaaacgttaacaatccggaggctgcatattccaaggttttacttattttatgatctgagcactttatattcacttacagaaagagttaaaagaatcacagtagaaaacagtaaagtttttctggttccttgtttactttcacaacatttaaaatcattagaatacttggatctcagtgaaaatttgatggttgaagaatacttgaaaaattcagcctgtgaggatgcctggccctctctacaaactttaattttaaggcaaaatcatttggcatcattggaaaaaaccggagagactttgctcactctgaaaaacttgactaacattgatatcagtaagaatagttttcattctatgcctgaaacttgtcagtggccagaaaagatgaaatatttgaacttatccagcacacgaatacacagtgtaacaggctgcattcccaagacactggaaattttagatgttagcaacaacaatctcaatttattttctttgaatttgccgcaactcaaagaactttatatttccagaaataagttgatgactctaccagatgcctccctcttacccatgttactagtattgaaaatcagtaggaatgcaataactacgttttctaaggagcaacttgactcatttcacacactgaagactttggaagctggtggcaataacttcatttgctcctgtgaattcctctccttcactcaggagcagcaagcactggccaaagtcttgattgattggccagcaaattacctgtgtgactctccatcccatgtgcgtggccagcaggttcaggatgtccgcctctcggtgtcggaatgtcacaggacagcactggtgtctggcatgtgctgtgctctgttcctgctgatcctgctcacgggggtcctgtgccaccgtttccatggcctgtggtatatgaaaatgatgtgggcctggctccaggccaaaaggaagcccaggaaagctcccagcaggaacatctgctatgatgcatttgtttcttacagtgagcgggatgcctactgggtggagaaccttatggtccaggagctggagaacttcaatccccccttcaagttgtgtcttcataagcgggacttcattcctggcaagtggatcattgacaatatcattgactccattgaaaagagccacaaaactgtctttgtgctttctgaaaactttgtgaagagtgagtggtgcaagtatgaactggacttctcccatttccgtctttttgatgagaacaatgatgctgccattctcattcttctggagcccattgagaaaaaagccattccccagcgcttctgcaagctgcggaagataatgaacaccaagacctacctggagtggcccatggacgaggctcagcgggaaggattttgggtaaatctgagagctgcgataaagtcctag

SEQ ID NO: 546 - DNA, 666 bp, Homo sapiens;
atggcgggaggggtgctcccgctgaggggcctccgcgccttgtgtcgcgtgctgctcttcctctcgcagttctgcattctgtcgggcggtgaaagtactgaaatcccaccttatgtgatgaagtgtccgagcaatggtttgtgtagcaggcttcctgcagactgtatagactgcacaacaaatttctcctgtacctatgggaagcctgtcacttttgactgtgcagtgaaaccatctgttacctgtgttgatcaagacttcaaatcccaaaagaacttcatcattaacatgacttgcagattttgctggcagcttcctgaaacagattacgagtgtaccaactccaccagctgcatgacggtgtcctgtcctcggcagcgctaccctgccaactgcacggtgcgggaccacgtccactgcttgggtaaccgtacttttcccaaaatgctatattgcaattggactggaggctataagtggtctacggctctggctctaagcatcaccctcggtgggtttggagcagaccgtttctacctgggccagtggcgggaaggcctcggcaagctcttcagcttcggtggcctgggaatatggacgctgatagacgtcctgctcattggagttggctatgttggaccagcagatggctctttgtacatttag

SEQ ID NO: 547 - DNA, 936 bp, Homo sapiens;
atgtccaaccccagcgccccaccaccatatgaagaccgcaaccccctgtacccaggccctccgccccctgggggctatgggcagccatctgtcctgccaggagggtatcctgcctaccctggctacccgcagcctggctacggtcaccctgctggctacccacagcccatgccccccacccacccgatgcccatgaactacggcccaggccatggctatgatggggaggagagagcagtgagtgatagcttcgggcctggagagtgggatgaccggaaagtgcgacacacttttatccgaaaggtttactccatcatctccgtgcagctgctcatcactgtggccatcattgctatcttcacctttgtggaacctgtcagcgcctttgtgaggagaaatgtggctgtctactacgtgtcctatgctgtcttcgttgtcacctacctgatccttgcctgctgccagggacccagacgccgtttcccatggaacatcattctgctgaccctttttacttttgccatgggcttcatgacgggcaccatttccagtatgtaccaaaccaaagccgtcatcattgcaatgatcatcactgcggtggtatccatttcagtcaccatcttctgctttcagaccaaggtggacttcacctcgtgcacaggcctcttctgtgtcctgggaattgtgctcctggtgactgggattgtcactagcattgtgctctacttccaatacgtttactggctccacatgctctatgctgctctgggggccatttgtttcaccctgttcctggcttacgacacacagctggtcctggggaaccggaagcacaccatcagccccgaggactacatcactggcgccctgcagatttacacagacatcatctacatcttcacctttgtgctgcagctgatgggggatcgcaattaa

SEQ ID NO: 548 - DNA, 717 bp, Homo sapiens;
atgtacgcccccggaggcgcagggctgcccggcgggcgccggcggaggagcccgggaggcagcgctctgcccaagcagccggagcgtagcctggcctcggccctgcctggcgccctgtctatcacggcgctgtgcactgccctcgccgagcccgcctggttgcacatccacggaggcacctgttcgcgccaggagctgggggtctccgacgtgttgggctatgtgcacccggacctgctgaaagatttctgcatgaatccccagacagtgctgctcctgcgggtcatcgccgccttctgtttcctgggcatcctgtgtagtctctccgctttccttctggatgtctttgggccgaagcatcctgctctgaagatcactcgtcgctatgccttcgcccatatcctaacggttctgcagtgtgccaccgtcattggcttttcttattgggcttctgaactcatcttggcccagcagcagcagcataagaagtaccatggatcccaggtctatgtcaccttcgccgttagcttctacctggtggcaggagctggtggagcctcaatcctggccacggcagccaacctcctgcgccactaccccacagaggaagaggagcaggcgctggagctgctctcagagatggaagagaacgagccctacccggcggaatatgaggtcatcaaccagttccagccaccccctgcttacacaccctaa

SEQ ID NO: 549 - DNA, 681 bp, Homo sapiens;
atgaccgtgcagagactcgtggccgcggccgtgctggtggccctggtctcactcatcctcaacaacgtggcggccttcacctccaactgggtgtgccagacgctggaggatgggcgcaggcgcagcgtggggctgtggaggtcctgctggctggtggacaggacccggggagggccgagccctggggccagagccggccaggtggacgcacatgactgtgaggcgctgggctggggctccgaggcagccggcttccaggagtcccgaggcaccgtcaaactgcagttcgacatgatgcgcgcctgcaacctggtggccacggccgcgctcaccgcaggccagctcaccttcctcctggggctggtgggcctgcccctgctgtcacccgacgccccgtgctgggaggaggccatggccgctgcattccaactggcgagttttgtcctggtcatcgggctcgtgactttctacagaattggcccatacaccaacctgtcctggtcctgctacctgaacattggcgcctgccttctggccacgctggcggcagccatgctcatctggaacattctccacaagagggaggactgcatggccccccgggtgattgtcatcagccgctccctgacagcgcgctttcgccgtgggctggacaatgactacgtggagtcaccatgctga

SEQ ID NO: 550 - DNA, 1368 bp, Homo sapiens;
atgggcctctccaccgtgcctgacctgctgctgccactggtgctcctggagctgttggtgggaatatacccctcaggggttattggactggtccctcacctaggggacagggagaagagagatagtgtgtgtccccaaggaaaatatatccaccctcaaaataattcgatttgctgtaccaagtgccacaaaggaacctacttgtacaatgactgtccaggcccggggcaggatacggactgcagggagtgtgagagcggctccttcaccgcttcagaaaaccacctcagacactgcctcagctgctccaaatgccgaaaggaaatgggtcaggtggagatctcttcttgcacagtggaccgggacaccgtgtgtggctgcaggaagaaccagtaccggcattattggagtgaaaaccttttccagtgcttcaattgcagcctctgcctcaatgggaccgtgcacctctcctgccaggagaaacagaacaccgtgtgcacctgccatgcaggtttctttctaagagaaaacgagtgtgtctcctgtagtaactgtaagaaaagcctggagtgcacgaagttgtgcctaccccagattgagaatgttaagggcactgaggactcaggcaccacagtgctgttgcccctggtcattttctttggtctttgccttttatccctcctcttcattggtttaatgtatcgctaccaacggtggaagtccaagctctactccattgtttgtgggaaatcgacacctgaaaaagagggggagcttgaaggaactactactaagcccctggccccaaacccaagcttcagtcccactccaggcttcacccccaccctgggcttcagtcccgtgcccagttccaccttcacctccagctccacctatacccccggtgactgtcccaactttgcggctccccgcagagaggtggcaccaccctatcagggggctgaccccatccttgcgacagccctcgcctccgaccccatccccaacccccttcagaagtgggaggacagcgcccacaagccacagagcctagacactgatgaccccgcgacgctgtacgccgtggtggagaacgtgcccccgttgcgctggaaggaattcgtgcggcgcctagggctgagcgaccacgagatcgatcggctggagctgcagaacgggcgctgcctgcgcgaggcgcaatacagcatgctggcgacctggaggcggcgcacgccgcggcgcgaggccacgctggagctgctgggacgcgtgctccgcgacatggacctgctgggctgcctggaggacatcgaggaggcgctttgcggccccgccgccctcccgcccgcgcccagtcttctcagatga

SEQ ID NO: 551 - DNA, 753 bp, Homo sapiens;
atgccagcctcatctcctttcttgctagcccccaaagggcctccaggcaacatggggggcccagtcagagagccggcactctcagttgccctctggttgagttggggggcagctctgggggccgtggcttgtgccatggctctgctgacccaacaaacagagctgcagagcctcaggagagaggtgagccggctgcaggggacaggaggcccctcccagaatggggaagggtatccctggcagagtctcccggagcagagttccgatgccctggaagcctgggagaatggggagagatcccggaaaaggagagcagtgctcacccaaaaacagaagaagcagcactctgtcctgcacctggttcccattaacgccacctccaaggatgactccgatgtgacagaggtgatgtggcaaccagctcttaggcgtgggagaggcctacaggcccaaggatatggtgtccgaatccaggatgctggagtttatctgctgtatagccaggtcctgtttcaagacgtgactttcaccatgggtcaggtggtgtctcgagaaggccaaggaaggcaggagactctattccgatgtataagaagtatgccctcccacccggaccgggcctacaacagctgctatagcgcaggtgtcttccatttacaccaaggggatattctgagtgtcataattccccgggcaagggcgaaacttaacctctctccacatggaaccttcctggggtttgtgaaactgtga

SEQ ID NO: 552 - DNA, 1911 bp, Homo sapiens;
atggaagggagaggaccgtaccggatctacgaccctgggggcagcgtgccctcaggagaggcatccgcagcttttgagcgcctagtgaaggagaattcccggctgaaggaaaaaatgcaagggataaagatgttaggggagcttttggaagagtcccagatggaagcgaccaggctccggcagaaggcagaggagctagtgaaggacaacgagctgctcccaccaccttctccctccttgggctccttcgaccccctggctgagctcacaggaaaggactcaaatgtcacagcatctcccacagcccctgcatgccccagtgacaagccagcaccagtccagaagcctccatccagtggcacctcctctgaatttgaagtggtcactcctgaggagcagaattcaccagagagcagcagccatgccaatgcgatggcgctgggccccctgccccgtgaggacggcaacctgatgctgcacctgcagcgcctggagaccacgctgagtgtgtgtgccgaggagccggaccacggccagctcttcacccacctgggccgcatggccctggagttcaaccgactggcatccaaggtgcacaagaatgagcagcgcacctccattctgcagaccctgtgtgagcagcttcggaaggagaacgaggctctgaaggccaagttggataagggcctggaacagcgggatcaggctgccgagaggctgcgggaggaaaatttggagctcaagaagttgttgatgagcaatggcaacaaagagggtgcgtctgggcggccaggctcaccgaagatggaagggacaggcaagaaggcagtggctggacagcagcaggctagtgtgacggcaggtaaggtcccagaggtggtggccttgggcgcagccgagaagaaggtgaagatgctggagcagcagcgcagtgagctgctggaagtgaacaagcagtgggaccagcatttccggtccatgaagcagcagtatgagcagaagatcactgagctgcgtcagaagctggctgatttgcagaagcaggtgactgacctggaggccgagcgggagcagaagcagcgtgactttgaccgcaagctcctcctggccaagtccaagattgaaatggaggagaccgacaaggagcagctgacagcagaggccaaggagctgcgccaaaaggtcaagtacctgcaggatcagctgagcccactcacccgacagcgtgagtaccaggaaaaggagatccagcggctcaacaaggccctggaggaagcactgagcatccaaaccccgccatcatctccaccaacagcatttgggagcccagaaggagcaggggccctcctaaggaaacaggagctggtcacgcagaatgagttgctgaaacagcaggtgaagatcttcgaggaggacttccagagggagcgcagtgatcgtgagcgcatgaatgaggagaaggaagagctgaagaagcaagtggagaagctgcaggcccaggtcaccctgtcaaatgcccagctaaaagcattcaaagatgaggagaaggcaagagaagccctcagacagcagaagaggaaagcaaaggcctcaggagagcgttaccatgtggagccccacccagaacatctctgcggggcctacccctacgcctacccgcccatgccagccatggtgccacaccatggcttcgaggactggtcccagatccgctacccccctccccccatggccatggagcacccgcccccactccccaactcgcgcctcttccatctgccggaatacacctggcgtctaccctgtggaggggttcgaaatccaaatcagagctcccaagtgatggaccctcccacagccaggcctacagaaccagagtctccaaaaaatgaccgtgaggggcctcagtga

SEQ ID NO: 553 - DNA, 3117 bp, Homo sapiens;
atgcagccagaggagggcacaggctggctgctggagctgctgtccgaggtgcagctgcaacagtacttcctgcggctccgagatgacctcaacgtcacccgcctgtcccactttgagtacgtcaagaatgaggacctggagaagatcggcatgggtcggcctggccagcggcggctgtgggaggctgtgaagaggaggaaggccttgtgcaaacgcaagtcgtggatgagtaaggtgttcagtggaaagcgactggaggctgagttcccacctcatcactctcagagcaccttccggaagacctcgcccgcccctgggggcccagcaggggaggggcccctgcagagcctcacctgcctcattggggagaaggacctgcgcctcctggagaagctgggtgatggttcctttggcgtggtgcgcaggggcgagtgggacgcgccctcagggaagacggtgagtgtggctgtgaagtgcctgaagcccgatgtcctgagccagccagaagccatggacgacttcatccgggaggtcaatgccatgcactcgctcgaccaccgaaacctcatccgcctctacggggtggtgctcacgccgcccatgaagatggtgacagagctggcacctctgggatcgttgttggaccggctacgtaagcaccagggccacttcctcctggggactctgagccgctacgctgtgcaggtggctgagggcatgggctacctggagtccaagcgctttattcaccgtgacctggctgcccgcaatctgctgttggctacccgcgacctggtcaagatcggggactttgggctgatgcgagcactacctcagaatgacgaccattacgtcatgcaggaacatcgcaaggtgcccttcgcctggtgtgcccccgagagcctgaagacacgcaccttctcccatgccagcgacacctggatgttcggggtgacactgtgggaaatgttcacctacggccaggagccctggatcggcctcaacggcagtcagatcctgcataagatcgacaaggagggggagcggctgccccggcccgaggactgtccccaggacatctacaacgtcatggtccagtgctgggctcacaagccagaggacagacccacgtttgtggccctgcgggacttcctgctggaggcccagcccacagacatgcgggcccttcaggactttgaggaaccggacaagctgcacatccagatgaatgatgtcatcaccgtcatcgagggaagggccgagaactactggtggcgtggccagaacacacggacgctgtgtgtggggcccttccctcgcaacgtggtgacctccgtggccggcctgtcggcccaggacatcagccagcccctgcagaacagcttcatccacacagggcatggcgacagtgacccccgccactgctggggcttcccggacaggattgacgaactgtatctgggaaaccccatggacccccccgacctcctgagcgtggaactgagcacctcccggcccccccagcatctaggaggggtgaaaaaaccaacctatgaccctgtgagcgaggaccaagaccccttgtccagcgacttcaagaggctgggcctgcggaagccaggcctgccccgagggctgtggctggcgaagccctcggcgcgggtgccgggcaccaaggccagccgaggcagcggggctgaggtcacgctcatcgacttcggtgaggagcccgtggtcccggccctacggccctgcgcgccctccctggcgcagctggccatggacgcctgctccctgctggacgagaccccgcctcagagccccacgcgggcactgccccggcccctgcaccccacgcctgtggtggactgggacgcacgcccgctgccccccccgcccgcctatgacgacgtggcccaggatgaggatgactttgagatctgctccatcaacagcaccctcgtgggcgcgggggtccctgccgggcccagccagggccagaccaactacgcctttgtgcctgagcaggcgcggccgccccctcccctggaggacaacctgttcctcccgccccagggtgggggcaagccgcccagctccgcacagaccgcagagatcttccaggcgctacagcaggagtgcatgaggcaactgcaggctccggccggctccccggccccctctcccagcccggggggtgacgacaagccccaggtgcctcctcgggtacccatcccccctcggcccacgcgcccacacgtccagctgtctccagcccccccgggcgaggaggagaccagccagtggcctggacctgcttcccctccccgggtgcctccgcgggagcccctgtcccctcaaggctcgaggacacccagccccctggtaccacctggcagctccccgctgccaccccggctctcaagctcacctgggaagaccatgcccaccacccagagctttgcctcagaccccaagtacgccaccccccaggtgatccaggcccctggcccgcgggctggtccctgcatcctgcccatcgtccgggatggcaagaaggtcagcagcacccactattacttgctgcccgagcgaccatcctacctggagcgctaccagcgcttcctgcgtgaggcccagagccccgaggagcctacccccctgcctgtgcctctgctgctgcccccacccagcaccccagcccccgccgcccccacggccaccgtgcggccgatgccccaggctgccttggaccccaaggccaacttctccaccaacaacagcaacccaggggcccggccaccacccccgagggccactgctcggctgccacagaggggctgccctggcgatgggccagaggcgggccggccagcagacaagatccagatggccatggtgcatggggtgaccacagaggagtgccaggcggccctgcagtgccacggctggagcgtgcagagggctgcccagtatctgaaggtggagcagctcttcgggctgggtctgcggcccagaggggagtgccacaaagtgctggagatgttcgactggaacctggagcaggccggctgccaccttctgggctcctggggccctgcccaccacaagcgctga

SEQ ID NO: 554 - DNA, 5172 bp, Homo sapiens;
atgagagagaaggagcaagaaagggaagaacagttaatggaagacaagaaaaggaagaaagaggataaaaagaaaaaagaagccactcagaaggtcacggaacaaaaaaccaaagtgcccgaagtgacgaaaccaagtttaagccaaccaacggccgccagcccaattggcagctctccatcgccaccagtcaatggtggcaacaatgccaaaagggtggcagtgccgaacggacaaccgccaagcgccgcccgctacatgcctcgggaggtgccgccgcgattccgttgccagcaggaccacaaagtgttactaaaacgtgggcagccccctccaccgtcctgcatgctccttgggggtggggcagggcctcctccctgcacagcacctggagcaaacccaaacaacgcacaagtgacaggagcgctgctgcagagtgagagtgggactgcgccagactcaacccttggaggtgctgctgcttcaaattatgcaaattccacttggggctcgggagcctcctccaacaacggcacctcccccaacccaattcacatctgggacaaggtgattgtagacgggtctgacatggaagagtggccttgtattgccagcaaagacactgaatcttcttccgaaaacaccaccgataacaacagtgcctcgaaccctggctctgagaagagcactctgccaggaagcaccactagtaacaaaggaaaagggagccagtgccagtctgcaagttctgggaacgaatgtaatcttggggtctggaaatctgaccctaaggctaaatctgttcaatcttccaactctactacagagaacaacaatggactaggaaattggaggaatgtgagtggtcaggatagaattggacctggctctggcttcagcaactttaacccaaatagcaacccatctgcctggccagcactggtccaagaaggaacttctaggaaaggggcattggaaacagataatagtaattccagtgcacaggttagcacagtaggtcagacatccagggaacagcagtcaaagatggaaaatgcgggtgttaattttgttgtctctggcagagaacaggctcaaattcataacactgatggaccaaaaaatggaaacactaactccttgaacttaagttcaccaaaccccatggagaataagggaatgccctttggaatgggcttggggaacacctccaggagcactgatgccccttcacaaagcactggagatcgaaagactgggagtgttggatcttggggtgcagctagggggccttctggaactgacacagtctctggacaaagcaattctggaaacaatgggaacaatggaaaagagagagaggactcctggaaaggagcttctgttcagaaatcaactgggtcaaaaaatgactcttgggacaacaataacaggtctacgggtgggtcctggaactttggcccccaggactctaatgacaacaaatggggtgaagggaacaaaatgacatctggggtctctcagggagaatggaaacagccgactgggtctgatgagttgaaaattggagaatggagtggtccaaaccaaccaaattctagcactggagcatgggacaatcaaaagggccaccccctccctgaaaaccaaggcaatgcccaggctccctgttggggaagatcttccagctccacaggaagtgaagttggaggtcaaagcactggaagcaaccacaaagcaggaagtagtgacagtcataactctggccgtcggtcgtacaggcccacacatcctgattgtcaggctgtcttgcagactcttttgagccgaactgatttggaccccagggtgctctcaaacactggctggggccaaactcaaattaagcaggacacagtgtgggacattgaagaggtgccaaggcctgaggggaaatctgacaaaggaactgaggggtgggagagcgctgccacacagaccaagaactcagggggctggggagatgcacccagccaaagcaatcaaatgaagtctggatggggggagctctcagcctctacagagtggaaagaccccaagaacacaggaggctggaatgactacaagaacaacaactcttccaactggggaggaggacgacctgatgaaaagacaccttcctcttggaatgagaatcccagcaaggatcaggggtggggaggtggacgccagcccaatcaaggatggtcttctggaaagaatggttggggggaggaagtcgatcagacaaaaaacagcaattgggaaagttctgcaagtaaacctgtgtctgggtggggtgaaggagggcagaatgaaatcgggacttggggtaatggtggcaatgcaagcctagcttcaaaaggtgggtgggaggattgcaaaagatccccagcatggaatgagacgggccgacagcccaattcctggaataaacaacaccaacagcagcagcccccacagcagccgccgccaccacaaccagaggcttctggttcgtggggaggcccacccccaccacctccaggcaacgttcgaccttccaattccagctggagcagcgggccacagcctgcaacacctaaggatgaggaacccagtggttgggaagagccatccccacagtcaattagtcggaaaatggacattgatgatggcacttcagcatggggagaccctaacagttataactacaagaatgtgaatctgtgggataagaattcccaagggggcccagcacctcgagaaccaaacctgcccaccccaatgaccagtaaatcggcatcagattccaaatctatgcaagacggctggggggagagtgacgggccagtcacaggagctcgccatcccagctgggaagaggaggaggatggaggagtctggaacaccactggctctcagggcagtgcttcctcccacaactcagcaagctggggacaaggaggaaagaaacaaatgaagtgctcactcaaaggaggaaacaatgattcatggatgaatcctcttgccaaacagttttcaaatatgggattgctgagtcagactgaagataatccaagcagcaaaatggatttgtctgtaggaagcctttcagataaaaaatttgatgtggacaagcgagcgatgaatctcggggattttaatgatatcatgaggaaggatcgatctgggttccgtccacctaattccaaagacatgggaaccacagatagtgggccttattttgagaagggcggtagtcatggtttgtttggaaacagcacagcacaatcgagaggtctgcacacacccgtgcagccactaaattcttctcccagtctccgggcgcaagtgcctccccagtttatttccccccaggtttctgcctcaatgctcaagcagtttcccaacagtggcctgagtccaggtcttttcaatgtggggccccagttatctcctcaacaaattgccatgctgagccagcttccacaaattccccagtttcagttggcatgtcagcttctcttgcagcagcagcaacagcagcagttgttacagaaccagagaaagatttctcaagctgtacgccaacagcaagagcagcagctggctcgaatggtgagtgcactgcagcagcagcagcagcagcagcagaggcagccaggcatgaagcactcgccctctcatcctgttgggcccaagccgcatctggacaacatggtacccaacgcattgaatgtggggctcccagaccttcaaaccaaagggccaatacctggatatggttctggcttcagctctggcggcatggactatggcatggttggtgggaaggaggctggaaccgagtctcgctttaaacagtggacctccatgatggaggggctgccctctgtagccacacaggaagccaatatgcacaaaaatggcgctatagtggcccctggtaaaacccggggagggtcaccgtacaaccagtttgatatcatccctggtgacacactgggtggccatacgggtcctgctggtgatagctggttacctgccaaatctccaccaacaaataaaatcggaagtaaatccagcaatgccagttggcctccagaattccaaccaggagtgccatggaaaggtatccaaaacattgaccctgaatctgacccctatgtcaccccaggaagtgtgctggggggtacagccacatctcccattgtagatactgaccaccaactgctgcgggataacaccacagggtctaattcttccctcaacacctcgctgccttcacctggtgcctggccctacagtgcctctgacaactcctttaccaacgttcatagcacttcagcaaagttccctgattacaaatcaacatggtccccagatcccataggacacaaccccactcatctctccaacaagatgtggaaaaaccatatttcctccaggaacactacaccgctgccccgcccacctcctggtctgaccaaccccaaaccatcatctccctggagcagcacagcaccccgatcagtcagggggtgggggacacaggactcacggctcgcctcggcctctacctggagtgatggtggctcagttcgtcctagttactggctggttcttcacaatctcaccccacagattgatgggtcaaccttgagaacgatctgcatgcagcatggcccactgctgacattccatctgaatctaacccagggcactgccctgatccgatacagcaccaaacaggaggcggccaaggcccaaactgcactgcacatgtgtgtgttgggaaacactaccatccttgctgagtttgccactgatgatgaagtcagccgctttctggcacaagctcagccccctacacctgcagcaaccccaagtgcgccagctgcggggtggcagtcgctggagaccggccagaaccagtcagatcccgtgggacctgctctgaatctttttggtgggtccactgggctcgggcagtggagcagcagcgctggtggcagcagcggggccgatcttgctggcgcttcattgtgggggcccccaaactattcttctagcttatggggagtcccaacggtggaagatccccataggatgggcagccctgctcctttactacctggtgaccttctgggaggagggtcggattcaatctga

SEQ ID NO: 555 - DNA, 3138 bp, Homo sapiens;
atggggtcgcagccgccgctggggtctccgctgtctcgcgaggagggtgaagcgcccccgcctgctcccgcttcggagggtaggcggagaagtcgccgggtacgccttcgcggatcctgccgacaccgacctagctttctgggctgccgggagctcgcggcgagcgccccagccaggcctgcgccggcatcctccgagataatggcatcagctgctaaggaatttaaaatggacaacttttcacctaaagctggcactagcaaattgcaacagacagtaccagctgatgcatctcctgattctaagtgtcctatatgcttggatagatttgataatgtgtcttacttagatcgctgcttacataagttctgttttcgctgtgtacaggagtggtcaaaaaacaaagctgaatgcccactatgtaaacagccctttgattctattttccattctgtgagggcagaagatgacttcaaggagtatgtcctaaggccttcgtataatggttcttttgtcacccctgatcgacgatttcgctaccgtacaactctgacaagggaacgaaatgcttctgtgtattcacctagtggtcctgtgaacagaagaacaacaactccaccggatagtggagtactgtttgaagggttaggcatttcaacaagacctagagatgttgaaattcctcagtttatgagacagattgcagtaaggaggccaactacggcagatgaaagatctttgcggaaaattcaagaacaagatattattaattttagacgaactctttatcgtgctggtgctcgagttagaaatattgaagatggtggccgctacagggatatttcagctgaatttttccgtagaaatccagcttgccttcacagattagtcccctggttaaaacgtgaacttacagttctttttggagctcatggatctttagtgaatattgtccagcatattatcatgagtaatgttactcgctatgacttggagagtcaggcatttgtgtctgatttaagaccatttttacttaatcgaactgagcattttatacatgaatttatcagttttgcccgatctccttttaacatggcagcctttgaccagcatgccaattatgattgccctgctccttcatacgaagaaggcagccattctgattcttcagtcataacaatatctccagatgaggctgagacccaagagctggatattaatgtagccactgttagtcaggcaccatgggatgatgaaactccaggaccatcttactcaagctcagagcaggtacacgttactatgtcttctcttttaaatacttctgacagttcagatgaagaacttgtcacaggaggagccacgtctcagatacaaggagtacaaaccaatgacgacctaaataatgacagtgatgattcttcagataattgtgtcattgttgggtttgttaaaccactagctgagaggaccccagaacttgttgaactgtcctctgattctgaggacttaggttcttatgagaaaatggagacagtgaagacacaagaacaggagcaatcttacagttctggtgatagcgatgttagtagatgctcatctccacactctgtccttggaaaggatgaacaaataaataaaggtcattgtgattctagtacaagaatcaaatcaaagaaggaagagaaacgatctacatcattgtcatctcccagaaacctgaactcatctgtaagaggagacagagtatattctccatataaccatagacacagaaagaggggaagatcaagaagttcagattcacgttctcagagtagaagtgggcatgatcagaagaatcatagaaagcatcatgggaagaaaagaatgaaaagtaaacgatccagaagcagggaaagtagcagacctagagggagaagagacaaaaagagatcaagaactagagatagcagttggtccagaagaagccaaactctgtctctaagtagtgaaagcacaagcagatcaaggtctcgtagcagtgatcatggtaaaagaagatcacggagcagaaatagagatcgttattatttaagaaataattatggaagcagatacaaatgggagtatacttattacagtagaaacaaggacagggatgggtacgaatcatcttacaggaggaggactctgtccagagctcattattctagacagtcttcaagtccagaatttagagttcagtccttttctgaaagaacaaatgctaggaaaaaaaataatcacagtgagaggaagtattactactatgaaaggcacagatcaaggagcctgtctagtaacagatcaaggactgcatctaccgggactgaccgggtgagaaatgaaaagcctggagggaaacgaaaatacaaaacacggcatttggagggtactaacgaagtggctcagccatctcgtgaatttgcttctaaagcaaaggacagtcattaccaaaaatcttcatcaaaattggatggaaactacaaaaatgagagtgataccttttcagacagccgatcatcagacagagagacaaaacacaaaaggagaaaaaggaagacccggagcctaagtgtagagatagtttatgaaggaaaagctactgatacaactaaacaccataaaaagaaaaagaagaaacataagaagaagcataagaaacaccatggagataatgcttcacgttccccagttgtaattaccattgacagtgacagtgataaggattctgaagtaaaggaggatacagaatgtgacaatagtggtcctcaagaccctctacaaaatgagtttttggctccttccttggaaccatttgaaactaaagatgtagttacaatagaagctgaatttggtgtgctggacaaggaatgtgatattgccacacttagtaacaacttgaataatgccaacaaaactgtagataatattccacctctggcagcttcagttgaacaaactctcgatgtaagagaagagagcacctttgtttctgatttggagaaccagcccagtaacattgtgtctcttcaaactgagccatcaaggcaattgccatcgccacggacatcattaatgtcagtatgtcttggtagagactgtgatatgtcttaa

SEQ ID NO: 556 - DNA, 2061 bp, Homo sapiens;
atgtccctgcgagacaagggcggggaagaagaatgttttgaatacgactgccaggatgaagagaggaagccaacccacaggcagcatgacacccaggacctcttggaagaggttttatgtgctgaaagagttggccagatgactaagacatataatgacatagatgctgtcactcggcttcttgaggagaaagagcgggatttagaattggccgctcgcatcggccagtcgttgttgaagaagaacaagaccctaaccgagaggaacgagctgctggaggagcaggtggaacacatcagggaggaggtgtctcagctccggcatgagctgtccatgaaggatgagctgcttcagttctacaccagcgctgcggaggagagtgagcccgagtccgtttgctcaaccccgttgaagaggaatgagtcgtcctcctcagtccagaattactttcatttggattctcttcaaaagaagctgaaagaccttgaagaggagaatgttgtacttcgatccgaggccagccagctgaagacagagaccatcacctatgaggagaaggagcagcagctggtcaatgactgcgtgaaggagctgagggatgccaatgtccagattgctagtatctcagaggaactggccaagaagacggaagatgctgcccgccagcaagaggagatcacacacctgctatcgcaaatagttgatttgcagaaaaaggcaaaagcttgcgcagtggaaaatgaagaacttgtccagcatctgggggctgctaaggatgcccagcggcagctcacagccgagctgcgtgagctggaggacaagtacgcagagtgcatggagatgctgcatgaggcgcaggaggagctgaagaacctccggaacaaaaccatgcccaataccacgtctcggcgctaccactcactgggcctgtttcccatggattccttggcagcagagattgagggaacgatgcgcaaggagctgcagttggaagaggccgagtctccagacatcactcaccagaagcgtgtctttgagacagtaagaaacatcaaccaggttgtcaagcagagatctctgaccccttctcccatgaacatccccggctccaaccagtcctcggccatgaactccctcctgtccagctgcgtcagcaccccccggtccagcttctacggcagcgacataggcaacgtcgtcctcgacaacaagaccaacagcatcattctggaaacagaggcagccgacctgggaaacgatgagcggagtaagaagccggggacgccgggcaccccaggctcccacgacctggagacggcgctgaggcggctgtccctgcgccgggagaactacctctcggagaggaggttctttgaggaggagcaagagaggaagctccaggagctggcggagaagggcgagctgcgcagcggctccctcacacccactgagagcatcatgtccctgggcacgcactcccgcttctccgagttcaccggcttctctggcatgtccttcagcagccgctcctacctgcctgagaagctccagatcgtgaagccgctggaaggttccgccacacttcaccactggcagcagttggcccaacctcaccttgggggcatcctggacccccggcccggtgtggtcaccaagggcttccggacgctggatgttgacctggacgaagtgtactgccttaacgactttgaagaagatgacacaggtgaccacatttctctcccacgcctagctacctccactccagttcagcacccagagacctcaggtgagaggtcccaagcacgtgtgactgtctcaggcagcagaagttacccgagccggcctcaggcttccccagaggagatgcaggagccgccagcggccacggaggaggaggaggaggaggaggaggaggaggggtctggtgagggcaccacgataagtcctgtaaacttggcacctttcccggaggcagagttttgggccattctcacctctgttccaggcaccatccgtagtggttctctgtctgtagcttccgctcgtctgtgtgggtga

SEQ ID NO: 557 - DNA, 705 bp, Homo sapiens;
atgaggaagaccaggctctgggggctgctgtggatgctctttgtctcagaactccgagctgcaactaaattaactgaggaaaagtatgaactgaaagaggggcagaccctggatgtgaaatgtgactacacgctagagaagtttgccagcagccagaaagcttggcagataataagggacggagagatgcccaagaccctggcatgcacagagaggccttcaaagaattcccatccagtccaagtggggaggatcatactagaagactaccatgatcatggtttactgcgcgtccgaatggtcaaccttcaagtggaagattctggactgtatcagtgtgtgatctaccagcctcccaaggagcctcacatgctgttcgatcgcatccgcttggtggtgaccaagggtttttcagggacccctggctccaatgagaattctacccagaatgtgtataagattcctcctaccaccactaaggccttgtgcccactctataccagccccagaactgtgacccaagctccacccaagtcaactgccgatgtctccactcctgactctgaaatcaaccttacaaatgtgacagatatcatcagggttccggtgttcaacattgtcattctcctggctggtggattcctgagtaagagcctggtcttctctgtcctgtttgctgtcacgctgaggtcatttgtaccctag

SEQ ID NO: 558 - DNA, 1032 bp, Homo sapiens;
atgaacatacacaggtctacccccatcacaatagcgagatatgggagatcgcggaacaaaacccaggatttcgaagagttgtcgtctataaggtccgcggagcccagccagagtttcagcccgaacctcggctccccgagcccgcccgagactccgaacttgtcgcattgcgtttcttgtatcgggaaatacttattgttggaacctctggagggagaccacgtttttcgtgccgtgcatctgcacagcggagaggagctggtgtgcaaggtgtttgatatcagctgctaccaggaatccctggcaccgtgcttttgcctgtctgctcatagtaacatcaaccaaatcactgaaattatcctgggtgagaccaaagcctatgtgttctttgagcgaagctatggggacatgcattccttcgtccgcacctgcaagaagctgagagaggaggaggcagccagactgttctaccagattgcctcggcagtggcccactgccatgacggggggctggtgctgcgggacctcaagctgcggaaattcatctttaaggacgaagagaggactcgggtcaagctggaaagcctggaagacgcctacattctgcggggagatgatgattccctctccgacaagcatggctgcccggcttacgtaagcccagagatcttgaacaccagtggcagctactcgggcaaagcagccgacgtgtggagcctgggggtgatgctgtacaccatgttggtggggcggtaccctttccatgacattgaacccagctccctcttcagcaagatccggcgtggccagttcaacattccagagactctgtcgcccaaggccaagtgcctcatccgaagcattctgcgtcgggagccctcagagcggctgacctcgcaggaaattctggaccatccttggttttctacagattttagcgtctcgaattcagcatatggtgctaaggaagtgtctgaccagctggtgccggacgtcaacatggaagagaacttggaccctttctttaactga

SEQ ID NO: 559 - DNA, 1656 bp, Homo sapiens;
atggcggagaattggaagaactgcttcgaggaggagctcatctgccctatctgcctgcacgttttcgtggagccagtgcagctgccgtgcaaacacaacttctgccggggctgcatcggcgaggcgtgggccaaggacagcggcctcgtacgctgcccagagtgcaaccaggcctacaaccagaagccgggcctggagaagaacctgaagctcaccaacatcgtggagaagttcaatgccctgcacgtggagaagccgccggcggcgctgcactgcgtgttctgccgccgcggccccccgctgcccgcgcagaaggtctgcctgcgctgcgaggcgccctgctgccagtcccacgtgcagacgcacctgcagcagccctccaccgcccgcgggcacctcctggtggaggcggacgacgtgcgggcctggagctgcccgcagcacaacgcctaccgcctctaccactgcgaggccgagcaggtggccgtgtgccagtactgctgctactacagcggcgcgcatcagggacactcggtgtgcgacgtggagatccgaaggaatgaaatccggaagatgctcatgaagcagcaggaccggctggaggagcgagagcaggacattgaggaccagctgtacaaactcgagtcagacaagcgcctggtggaggagaaagtgaaccaactgaaggaggaagttcggctgcagtacgagaagctgcaccagctgctggacgaggacctgcggcagacagtggaggtcctagacaaggcccaggccaagttctgcagcgagaacgcagcgcaggcgctgcacctcggggagcgcatgcaggaggccaagaagctgctgggctccctgcagctgctctttgataagacggaggatgtcagcttcatgaagaacaccaagtctgtgaaaatcctgatggacaggacccagacctgcacgagcagcagcctttcccccactaagatcggccacctgaactccaagctcttcctgaacgaagtggccaagaaggagaagcagctgcggaaaatgctagaaggccccttcagcacgccggtgcccttcctgcagagtgtccccctgtacccttgcggcgtgagcagctctggggcggaaaagcgcaagcactcaacggccttcccagaggccagtttcctagagacgtcgtcgggccctgtgggcggccagtacggggcggcgggcacagccagcggtgagggccagtctgggcagcccctggggccctgcagctccacgcagcacttggtggccctgccgggcggcgcccaaccagtgcactcaagccccgtgttccccccatcgcagtatcccaatggctccgccgcccagcagcccatgctcccccagtatggcggccgcaagattctcgtctgttctgtggacaactgttactgttcttccgtggccaaccatggcggccaccagccctacccccgctccggccactttccctggacagtgccctcgcaggagtactcacacccgctcccgcccacaccctccgtcccccagtcccttcccagcctggcggtcagagactggcttgacgcctcccagcagcccggccaccaggatttctacagggtgtatgggcagccgtccaccaaacactacgtgacgagctaa

SEQ ID NO: 560 - DNA, 1959 bp, Homo sapiens;
atgggcggatggaaggggccggggcagcgtcggggaaaggaagggccggaggcgcggcggcgggcggccgagaggggcggcggcggcggcggcggcggggttcccgcgccgcggagcccggcccgagagccgcgtccacgttcctgcctcctgctcccgccgccctggggcgccgccatgacgcccgatctgctcaacttcaagaagggatggatgtcgatcttggacgagcctggagagcctccctccccctcgctcaccaccacctctacttcgcagtggaagaaacattggtttgtgctgacagattcaagtctcaaatattacagagactccactgctgaggaggcagatgagctggatggtgagatcgacctgcgttcctgcacggatgtcactgagtacgcggtgcagcgcaactatggcttccagatccacaccaaggatgctgtctataccttgtcggccatgacctcaggcatccggcggaactggatcgaggctctgagaaagaccgtacgtccaacttcagccccagatgtcaccaagctctcggactctaacaaggagaacgcgctgcacagctacagcacccagaagggccccctgaaggcaggggagcagcgggcgggctctgaggtcatcagccggggtggccctcggaaggcggacgggcagcgtcaggccttggactacgtggagctctcgccgctgacccaggcttccccgcagcgggcccgcaccccagcccgcactcctgaccgcctggccaagcaggaggagctggagcgggacctggcccagcgctccgaggagcggcgcaagtggtttgaggccacagacagcaggaccccagaggtgcctgctggtgaggggccgcgccggggcctgggtgcccccctgactgaggaccagcaaaaccggcttagtgaggagatcgagaagaagtggcaggagctggagaagctgcccctgcgggagaataagcgggtgcccctcactgccctgctcaaccaaagccgcggagagcgccgagggcccccaagtgacggccacgaggcactggagaaggaggttcaggctcttcgggcccagctggaggcgtggcgtctccaaggggaggctcctcagagtgcactgagatcccaggaggatggccacatccccccgggctacatctcacaggaggcatgtgagcgcagcctggcagagatggagtcctcgcaccagcaggtgatggaggagctgcagcggcaccacgagcgggagctgcagcgcctgcagcaggagaaggagtggctcctggctgaggagacggcagccacggcctcagccattgaagccatgaagaaggcctaccaggaagagctgagccgagagctgagcaaaacacggagtctccagcagggcccggatggcctccggaagcagcaccagtcagatgtggaggcactgaagcgagagctgcaggtgctatcggagcagtactcgcagaagtgcctggagattggggcactcatgcggcaggctgaggagcgcgagcacacgctgcgccgctgccagcaggagggccaggagctgctgcgccacaaccaggagctgcatggccgcctgtcagaggagatagaccagctgcgcggcttcattgcctcgcagggcatgggcaatggctgcgggcgcagcaacgagcggagttcctgcgagctagaggtgctgcttcgcgtaaaagaaaacgaactccagtacctaaagaaggaggtgcagtgcctccgggacgagctccagatgatgcagaaggacaagcgcttcacctcgggaaagtaccaggacgtctatgtggagctgagccacatcaagacacggtctgagcgggagatcgagcagctgaaggagcacctgcgtcttgccatggccgccctccaggagaaggagtcgatgcgcaacagcctggctgagtag

SEQ ID NO: 561 - DNA, 405 bp, Homo sapiens;
atgaacaccgaaatgtatcagacccccatggaggtggcggtctaccagctgcacaatttctccatctccttcttctcttctctgcttggaggggatgtggtttccgttaagctggacaacagtgcctccggagccagcgtggtggccatagacaacaagatcgaacaggccatggatctggtgaagaatcatctgatgtatgctgtgagagaggaggtggagatcctgaaggagcagatccgagagctggtggagaagaactcccagctagagcgtgagaacaccctgttgaagaccctggcaagcccagagcagctggagaagttccagtcctgtctgagccctgaagagccagctcccgaatccccacaagtgcccgaggcccctggtggttctgcggtgtaa

SEQ ID NO: 562 - DNA, 3564 bp, Homo sapiens;
atgcctctgcgccactgggggatggccaggggcagtaagcccgttggggatggagcccagcccatggctgccatgggaggcctgaaggtgcttctgcactgggctggtccaggcggcggggagccctgggtcactttcagtgagtcatcgctgacagctgaggaagtctgcatccacattgcacataaagttggtatcactcctccttgcttcaatctctttgccctcttcgatgctcaggcccaagtctggttgcccccaaaccacatcctagagatccccagagatgcaagcctgatgctatatttccgcataaggttttatttccggaactggcatggcatgaatcctcgggaaccggctgtgtaccgttgtgggcccccaggaaccgaggcatcctcagatcagacagcacaggggatgcaactcctggacccagcctcatttgagtacctctttgagcagggcaagcatgagtttgtgaatgacgtggcatcactgtgggagctgtcgaccgaggaggagatccaccactttaagaatgagagcctgggcatggcctttctgcacctctgtcacctcgctctccgccatggcatccccctggaggaggtggccaagaagaccagcttcaaggactgcatcccgcgctccttccgccggcatatccggcagcacagcgccctgacccggctgcgccttcggaacgtcttccgcaggttcctgcgggacttccagccgggccgactctcccagcagatggtcatggtcaaatacctagccacactcgagcggctggcaccccgcttcggcacagagcgtgtgcccgtgtgccacctgaggctgctggcccaggccgagggggagccctgctacatccgggacagtggggtggcccctacagaccctggccctgagtctgctgctgggcccccaacccacgaggtgctggtgacaggcactggtggcatccagtggtggccagtagaggaggaggtgaacaaggaggagggttctagtggcagcagtggcaggaacccccaagccagcctgtttgggaagaaggccaaggctcacaaggcagtcggccagccggcagacaggccgcgggagccactgtgggcctacttctgtgacttccgggacatcacccacgtggtgctgaaagagcactgtgtcagcatccaccggcaggacaacaagtgcctggagctgagcttgccttcccgggctgcggcgctgtccttcgtgtcgctggtggacggctatttccgcctgacggccgactccagccactacctgtgccacgaggtggctcccccacggctggtgatgagcatccgggatgggatccacggacccctgctggagccatttgtgcaggccaagctgcggcccgaggacggcctgtacctcattcactggagcaccagccacccctaccgcctgatcctcacagtggcccagcgtagccaggcaccagacggcatgcagagcttgcggctccgaaagttccccattgagcagcaggacggggccttcgtgctggagggctggggccggtccttccccagcgttcgggaacttggggctgccttgcagggctgcttgctgagggccggggatgactgcttctctctgcgtcgctgttgcctgccccaaccaggagaaacctccaatctcatcatcatgcggggggctcgggccagccccaggacactcaacctcagccagctcagcttccaccgggttgaccagaaggagatcacccagctgtcccacttgggccagggcacaaggaccaacgtgtatgagggccgcctgcgagtggagggcagcggggaccctgaggagggcaagatggatgacgaggaccccctcgtgcctggcagggaccgtgggcaggagctacgagtggtgctcaaagtgctggaccctagtcaccatgacatcgccctggccttctacgagacagccagcctcatgagccaggtctcccacacgcacctggccttcgtgcatggcgtctgtgtgcgcggccctgaaaatatcatggtgacagagtacgtggagcacggacccctggatgtgtggctgcggagggagcggggccatgtgcccatggcttggaagatggtggtggcccagcagctggccagcgccctcagctacctggagaacaagaacctggttcatggtaatgtgtgtggccggaacatcctgctggcccggctggggttggcagagggcaccagccccttcatcaagctgagtgatcctggcgtgggcctgggcgccctctccagggaggagcgggtggagaggatcccctggctggcccccgaatgcctaccaggtggggccaacagcctaagcaccgccatggacaagtgggggtttggcgccaccctcctggagatctgctttgacggagaggcccctctgcagagccgcagtccctccgagaaggagcatttctaccagaggcagcaccggctgcccgagccctcctgcccacagctggccacactcaccagccagtgtctgacctatgagccaacccagaggccatcattccgcaccatcctgcgtgacctcacccggctgcagccccacaatcttgctgacgtcttgactgtgaacccggactcaccggcgtcggaccctacggttttccacaagcgctatttgaaaaagatccgagatctgggcgagggtcacttcggcaaggtcagcttgtactgctacgatccgaccaacgacggcactggcgagatggtggcggtgaaagccctcaaggcagactgcggcccccagcaccgctcgggctggaagcaggagattgacattctgcgcacgctctaccacgagcacatcatcaagtacaagggctgctgcgaggaccaaggcgagaagtcgctgcagctggtcatggagtacgtgcccctgggcagcctccgagactacctgccccggcacagcatcgggctggcccagctgctgctcttcgcccagcagatctgcgagggcatggcctatctgcacgcgcagcactacatccaccgagacctagccgcgcgcaacgtgctgctggacaacgacaggctggtcaagatcggggactttggcctagccaaggccgtgcccgaaggccacgagtactaccgcgtgcgcgaggatggggacagccccgtgttctggtatgccccagagtgcctgaaggagtataagttctactatgcgtcagatgtctggtccttcggggtgaccctgtatgagctgctgacgcactgtgactccagccagagcccccccacgaaattccttgagctcataggcattgctcagggtcagatgacagttctgagactcactgagttgctggaacgaggggagaggctgccacggcccgacaaatgtccctgtgaggtctatcatctcatgaagaactgctgggagacagaggcgtcctttcgcccaaccttcgagaacctcatacccattctgaagacagtccatgagaagtaccaaggccaggccccttcagtgttcagcgtgtgctga

SEQ ID NO: 563 - DNA, 342 bp, Homo sapiens;
atggggggacttgaaccctgcagcaggctcctgctcctgcctctcctgctggctgtaagtggtctccgtcctgtccaggcccaggcccagagcgattgcagttgctctacggtgagcccgggcgtgctggcagggatcgtgatgggagacctggtgctgacagtgctcattgccctggccgtgtacttcctgggccggctggtccctcgggggcgaggggctgcggaggcagcgacccggaaacagcgtatcactgagaccgagtcgccttatcaggagctccagggtcagaggtcggatgtctacagcgacctcaacacacagaggccgtattacaaatga

SEQ ID NO: 564 - DNA, 444 bp, Homo sapiens;
atggctctgaagagaatccacaaggaattgaatgatctggcacgggaccctccagcacagtgttcagcaggtcctgttggagatgatatgttccattggcaagctacaataatggggccaaatgacagtccctatcagggtggagtatttttcttgacaattcatttcccaacagattaccccttcaaaccacctaaggttgcatttacaacaagaatttatcatccaaatattaacagtaatggcagcatttgtcttgatattctacgatcacagtggtctccagcactaactatttcaaaagtactcttgtccatctgttctctgttgtgtgatcccaatccagatgatcctttagtgcctgagattgctcggatctacaaaacagatagagaaaagtacaacagaatagctcgggaatggactcagaagtatgcgatgtaa

SEQ ID NO: 565 - DNA, 462 bp, Homo sapiens;
atgatggcgagcatgcgagtggtgaaggagctggaggatcttcagaagaagcctcccccatacctgcggaacctgtccagcgatgatgccaatgtcctggtgtggcacgctctcctcctacccgaccaacctccctaccacctgaaagccttcaacctgcgcatcagcttcccgccggagtatccgttcaagcctcccatgatcaaattcacaaccaagatctaccaccccaacgtggacgagaacggacagatttgcctgcccatcatcagcagtgagaactggaagccttgcaccaagacttgccaagtcctggaggccctcaatgtgctggtgaatagaccgaatatcagggagcccctgcggatggacctcgctgacctgctgacacagaatccggagctgttcagaaagaatgccgaagagttcaccctccgattcggagtggaccggccctcctaa

SEQ ID NO: 566 - DNA, 3405 bp, Homo sapiens;
atgtcggagccccacagggtccagttcacctctctcccaggttccctgaatcctgcgtttttgaagaagtcccggaaggaggaggctggggcaggagaacagcatcaggactgtgagccggctgcagcagctgttcggattacactcaccctctttgaaccagatcacaaacgctgcccagagttcttctacccagagctggtgaagaatatccgagggaaggtaaaaggccttcagcctggagataagaagaaagatctgtcagatcctttcaatgacgaagaaaaggaaaggcataaagtagaggcccttgcccgaaaatttgaagaaaaatacggtggaaagaaacgtagaaaagaccgaatacaggacttgatcgatatggggtatggttatgatgaatccgactccttcatcgataactctgaggcgtatgatgagcttgttcctgcttctttgactacgaagtatggaggattttacattaactcgggaaccctgcagtttagacaagcatcagagtctgaagatgacttcattaaagaaaagaagaaaaaatctccaaagaagcggaagttgaaggaaggtggtgagaagataaagaagaagaaaaaagatgacacttatgacaaggagaagaaatcgaaaaagtccaagttttccaaagccggcttcacagccctcaatgccagtaaggagaagaagaagaagaaatattctggggctttaagcgttaaagagatgctaaagaaatttcagaaagagaaagaggctcagaaaaaaagggaggaggagcataagcctgttgcggtcccatcagcggaagctcagggcctgcgggaactggagggtgcctctgaccccttgctctcactctttggctctacttctgacaacgacttgctccaggcggccactgccatggactcgctgacggatttggacttggagcatctgctcagtgagtctccagaaggaagtcccttccgagatatggatgatggaagtgattcccttggggtgggattggaccaggaattcaggcagccctcttctctccccgaaggcctgccagcacccctggagaagcgcgttaaggagctggctcaggctgccagagctgctgagggggagagcagacagaagttcttcacccaggatattaatggaatcctattagacatagaggcgcagactcgggagctgagcagtcaggtccgctctggggtgtatgcctatcttgcgtcattcctgccctgcagcaaggatgccctgctcaagcgtgctcggaaacttcacctctatgaacaggggggccgtctgaaggagcctctccagaagctcaaggaagccattggcagggcgatgccagagcagatggccaagtaccaggacgaatgccaggcacacacgcaggcaaaggttgccaagatgctggaagaggagaaagacaaggagcagagggaccggatttgttcggatgaggaagaagatgaagaaaaagggggcaggaggataatgggacctcggaagaagttccaatggaatgatgagatcagggagctactgtgccaggtggtgaagatcaaactggagagccaggacctggagaggaacaacaaagcccaggcttgggaggactgtgtgaagggctttctggatgcggaagtcaagcccctctggcccaaaggctggatgcaggccagaactctgtttaaggagagcagacgaggccatgggcacctgacttcaatcctggccaagaagaaagttatggccccttctaaaatcaaggtgaaggaatcgtctacgaagcctgataaaaaggtttctgtcccatcaggacagattggtggccccattgctttgccctcagatcaccaaacaggaggcctgagtattggggcctcgagcagggagctcccatcccaggcatcgggcggccttgctaaccctcctcctgtcaacctggaggactcattggatgaagacttgatccgcaatccagcctcctcggtggaagccgtgtccaaggaattggctgcattgaatagcagagcagctgggaactctgaattcacactgcctgcaccctcaaaagcacctgcagaaaaagttggaggcgttttatgtacagaagaaaaaaggaactttgcgaagcctagtccttctgctccaccaccagctagctctctgcagtcacccctcaattttctggcagaacaggctctggcactggggcagtcctctcaggagaaaaaaccagagagttctggctacaaagagctgtcctgccaggctcccctcaataagggcctgccagaagtacatcagtccaaagctaagcaccacagcttgccacggacgtctcacgggccccaagtggcagttcctgtgcctggcccccaggtcaaagtctttcatgccggcactcagcagcagaaaaacttcacgcccccatctccatttgccaataagctccaaggcccaaaggcttctcccacacagtgtcatcgttccctcctgcagttagtgaagacagcggccaaaggccagggcttccatccctctgcaccagccacctcaggaggcctgtcagcctccagcagcagctctcacaagaccccagcctcgtcctcttctgccctgagccatccagcaaagccacattcagtcagctctgcaggctcatcttacaagaataatccctttgccagctcaatctccaaacatggggtttcttctggcagctcttcctcgggaggaacaccagtccagagttctgtttctgggagcctggtccctggcatacagcctccctccgtgggacaggccaccagccgacccgtcccaagttcagcagggaaaaaaatgcctgtttcccagaagttgactctggtagcccctccaggcggtccaaacggagattccagtggtgggacccagggagtggcaaagttgctgacctcgccgtccctaaagccctctgcagttagtagtgtgacatcgtctacctccttgtcaaaaggagcgagtgggactgtgctgctggccggctcctctttgatggcttcaccctacaaatccagcagcccaaagctgtctggggccatgagctcgaactccttgggaattataacccctgtccctattcctgtccatgtgctctccttcagcgctgactcctctgccaaagcaggggtctccaaggatgccatcgtcacaggccctgcccccgggtccttccaccatggccttggccacagtcttctggctggcttgcactccagcccgccccatgcagcgcctctcccacacgctgcggtgcccacccatatcccgcagagtctgccaggtgcttctcagcttcacgggaaagggcctgctgtaccacggaaattgtga

SEQ ID NO: 567 - DNA, 1875 bp, Homo sapiens;
atggctgagaatggcgagagcagcggccccccgcgcccctcccgcggccctgctgcggcccaaggctcggctgctgccccggctgagcctaaaatcatcaaagtcacggtgaagactcccaaagagaaagaggagttcgcggtgcccgagaacagctcggttcagcagtttaaggaagcgatttcgaaacgcttcaaatcccaaaccgatcagctagtgctgatttttgccggaaaaatcttaaaagatcaagataccttgatccagcatggcatccatgatgggctgactgttcaccttgtcatcaaaagccagaaccgacctcagggccagtccacgcagcctagcaatgccgcgggaactaacactacctcggcgtcgactcccaggagtaactccacacctatttccacaaatagcaacccgtttgggttggggagcctgggaggacttgcaggccttagcagcctgggcttgagctcgaccaacttctctgagctccagagccagatgcagcagcagcttatggccagccctgagatgatgatccaaataatggaaaatccctttgttcagagcatgctttcgaatcccgatctgatgaggcagctcattatggctaatccacagatgcagcaattgattcagagaaacccagaaatcagtcacctgctcaacaacccagacataatgaggcagacactcgaaattgccaggaatccagccatgatgcaagagatgatgagaaatcaagacctggctcttagcaatctagaaagcatcccaggtggctataatgctttacggcgcatgtacactgacattcaagagccgatgctgaatgccgcacaagagcagtttgggggtaatccatttgcctccgtggggagtagttcctcctctggggaaggtacgcagccttcccgcacagaaaatcgcgatccactacccaatccatgggcaccaccgccagctacccagagttctgcaactaccagcacgaccacaagcactggtagtgggtctggcaatagttccagcaatgctactgggaacaccgttgctgccgctaattatgtcgccagcatctttagtaccccaggcatgcagagcctgctgcaacagataactgaaaacccccagctgattcagaatatgctgtcggcgccctacatgagaagcatgatgcagtcgctgagccagaatccagatttggctgcacagatgatgctgaatagcccgctgtttactgcaaatcctcagctgcaggagcagatgcggccacagctcccagccttcctgcagcagatgcagaatccagacacactatcagccatgtcaaacccaagagcaatgcaggctttaatgcagatccagcaggggctacagacattagccactgaagcacctggcctgattccgagcttcactccaggtgtgggggtgggggtgctgggaaccgctataggccctgtaggcccagtcacccccataggccccataggccctatagtcccttttacccccataggccccattgggcccataggacccactggccctgcagccccccctggctccaccggctctggtggccccacggggcctactgtgtccagcgctgcacctagtgaaaccacgagtcctacatcagaatctggacccaaccagcagttcattcagcaaatggtgcaggccctggctggagcaaatgctccacagctgccgaatccagaagtcagatttcagcaacaactggaacagctcaacgcaatggggttcttaaaccgtgaagcaaacttgcaggccctaatagcaacaggaggcgacatcaatgcagccattgaaaggctgctgggctcccagccatcgtaa

SEQ ID NO: 568 - DNA, 996 bp, Homo sapiens;
atggcggagggcggaggccctgagcccggcgagcaggagaggaggtcttccgggccgcggcctccgagcgcgcgggatttgcagttggccttggcagaattgtatgaagatgaagtgaagtgcaaatcttccaagtctaatagacctaaagccacagtcttcaagagcccacggacaccacctcaacggttttactcaagtgaacatgaatacagtggattaaatatagttcgaccttcaactgggaaaattgtgaatgaacttttcaaagaggcaagggaacatggggctgtccctctgaatgaagccacaagagcttcaggtgatgataaatctaagtcatttacaggtggaggatacagattgggtagttctttttgtaagcggtctgaatatatctatggagaaaatcagctgcaagatgttcagattttgcttaaactgtggagcaatggtttcagtttagatgatggagaattgagaccttacaatgaaccaacaaatgctcaatttctggagtctgttaagagaggagagattcccctggagcttcagcgccttgttcatggtggccaagtgaatttggatatggaggatcatcaggatcaagaatacataaaacctagattgaggttcaaggcttttagtggagaagggcaaaaacttggaagccttacacctgaaatagtcagtacaccttcctctccagaagaggaggataaatcaatacttaatgcagttgttcttattgatgattcagtgccaacaacaaaaattcaaatcaggttagcagatgggagtcgtttgatacaaagattcaatagtacacacaggatcctggatgtccggaactttattgtacagtctcgtcctgaatttgcggctcttgactttattcttgtgacttcatttccgaataaagagctaacagatgaaagcctgacactgctagaagcagatattcttaacactgtgttactccagcaactaaaataa

SEQ ID NO: 569 - DNA, 2397 bp, Homo sapiens;
atggccctccacagcccgcagtatatttttggagattttagccctgatgaattcaatcaattctttgtgactcctcgatcttcagttgagcttcctccatacagtggaacagttctgtgtggcacacaggctgtggataaactacctgatggacaagaatatcagagaattgagtttggtgtcgatgaagtcattgaacccagtgacactttgccgagaacccccagctacagtatttcaagcacactgaaccctcaggcccctgaatttattctcggttgtacagcttccaaaataacccctgatggtatcactaaagaagcaagctatggctccatcgactgccagtacccaggctctgccctcgctttggatggaagttctaatgtggaggcggaagttttggaaaatgatggtgtctcaggtggtcttggacaaagggagcgtaaaaagaagaaaaagcggccacctggatattacagctatttgaaagatggtggcgatgatagtatctccacagaagccctggtcaatggccatgccaattcagcagtcccgaacagtgtcagtgcagaggatgcagaatttatgggtgacatgcccccgtcagttacgcccaggacttgtaacagcccccagaactccacagactctgtcagtgacattgtgcctgacagtcctttccccggagcactcggcagtgacaccaggactgcagggcagccagaggggggccccggggctgattttggtcagtcctgcttccctgcagaggctggcagagacaccctgtcaaggacagctggggctcagccctgcgttggtaccgatactactgaaaaccttggagttgctaatggacaaatacttgaatcctcgggtgagggcacagctaccaacggggtggagttgcacaccacggaaagcatagacttggacccaaccaaacccgagagtgcatcacctcctgctgacggcacgggctctgcatcaggcacccttcctgtcagccagcccaagtcctgggccagcctctttcatgattctaagccctcttcctcctcgccggtggcctatgtggaaactaagtattcccctcccgccatatctcccctggtttctgaaaagcaggttgaagtcaaagaagggcttgttccggtttcagaggatcctgtagccataaagattgcagagttgctggagaatgtaaccctaatccataaaccagtgtcgttgcaaccccgtgggctgatcaataaagggaactggtgctacattaatgctacactgcaggcattggttgcttgcccgccgatgtaccacctgatgaagttcattcctctgtattccaaagtgcaaaggccttgtacgtcaacacccatgatagacagctttgttcggctaatgaatgagttcactaatatgccagtacctccaaaaccccgacaagctcttggagataaaatcgtgagggatattcgccctggagctgcctttgagcccacatatatttacagactcctgacagttaacaagtcaagcctgtctgaaaagggtcgacaagaagatgctgaggaatacttaggcttcattctaaatggacttcatgaggaaatgttgaacctaaagaagcttctctcaccaagtaatgaaaaacttacgatttccaacggccccaaaaaccactcggtcaatgaagaagagcaggaagaacaaggtgaaggaagcgaggatgaatgggaacaagtgggcccccggaacaagacttccgtcacccgccaggcggattttgttcagactccaatcaccggcatttttggtggacacatcaggtctgtggtttaccagcagagttcaaaagaatctgccactttgcagccatttttcacgttgcagttggatatccagtcagacaagatacgcacagtccaggatgcactggagagcttggtggcaagagaatctgtccaaggttataccacaaaaaccaaacaagaggttgagataagtcgaagagtgactctggaaaaactccctcctgtcctcgtgctgcacctgaaacgattcgtttatgagaagactggtgggtgccagaagcttatcaaaaatattgaatatcctgtggacttggaaattagtaaagaactgctttctccaggggttaaaaataagaattttaaatgccaccgaacctatcggctctttgcagtggtctaccatcacggcaacagtgcgacgggcggccattacactacagacgtcttccagatcggtctgaatggctggctgcgcatcgatgaccagacagtcaaggtgatcaaccagtaccaggtggtgaaaccaactgctgaacgcacagcctacctcctgtattaccgccgagtggacctgctgtaa

SEQ ID NO: 570 - DNA, 2859 bp, Homo sapiens;
atggcggaaggcggagcggcggatctggacacccagcggtctgacatcgcgacgctgctcaaaacctcgctccggaaaggggacacctggtacctagtcgatagtcgctggttcaaacagtggaaaaaatatgttggctttgacagttgggacaaataccagatgggagatcaaaatgtgtatcctggacccattgataactctggacttctcaaagatggtgatgcccagtcacttaaggaacaccttattgatgaattggattacatactgttgccaactgaaggttggaataaacttgtcagctggtacacattgatggaaggtcaagagccaatagcacgaaaggtggttgaacagggtatgtttgtaaagcactgcaaagtagaagtatatctcacagaattgaagctatgtgaaaatggaaacatgaataatgttgtaactcgaagatttagcaaagctgacacaatagatacaattgaaaaggaaataagaaaaatcttcagtattccagatgaaaaggagaccagattgtggaacaaatacatgagtaacacatttgaaccactgaataaaccagacagcaccattcaggatgctggtttataccaaggacaggtattagtgatagaacagaaaaatgaagatggaacatggccaaggggtccttctactcctaatgtgaaaaactcaaattactgtcttccatcatataccgcttataagaactatgattattcggaacctggaagaaacaatgaacagccaggcctctgtggcctaagtaacttgggaaatacgtgtttcatgaactcagctattcagtgtttgagcaacacacctccacttactgagtatttcctcaatgataagtatcaagaagaactgaattttgacaatcccttaggaatgagaggtgaaatagctaaatcttatgccgaactgatcaagcaaatgtggtctggaaagtttagctacgtcaccccaagagcctttaagacacaggtaggacgttttgcacctcagttctctggatatcagcagcaagactgtcaagaactgttagctttcctattagatggattacatgaggatttgaatagaattaggaaaaaaccatatatacaattaaaagatgcagatggaaggccagataaggtggttgccgaagaagcctgggaaaaccatttaaaacgaaatgattctatcatagtagatatatttcatggccttttcaaatcaactttagtttgtcctgagtgtgctaagatttcagtaacatttgatcctttttgttacttgacacttccattgcccatgaaaaaagaacgcaccttggaagtttacttagttagaatggatccacttaccaaacctatgcagtacaaagtggttgtccccaaaattggaaacatattagatctttgtacagcattgtctgctttgtcaggaatacctgcagataagatgatagttactgatatatacaatcatagatttcacagaatattcgctatggatgaaaaccttagtagtattatggaacgggatgatatttatgtgtttgaaattaacatcaataggacagaagatacagagcacgtgattattcctgtttgcctaagagaaaaattcagacactcgagttatacccaccatactggttcttcactttttggtcagccctttcttatggctgtaccacgaaacaatactgaagacaaactttataatctcctgctcttgagaatgtgccgatatgtcaaaatatctactgaaactgaagaaactgaaggatccctacactgctgtaaggaccaaaatattaatgggaatggcccaaatggcatacatgaagaaggctcaccaagtgaaatggaaacagatgagccagatgatgaatccagccaggatcaagaacttccctcagagaatgaaaacagtcagtctgaagattcagttggaggagataatgattctgaaaatggattatgtactgaggatacttgcaaaggtcaactcacgggacacaaaaaacgattgtttacattccagttcaacaacttaggcaatactgatatcaactacatcaaagatgataccaggcatataagatttgatgataggcagcttaggctagatgaaagatcttttcttgctttggattgggatcctgatttgaaaaaaagatattttgatgaaaatgctgctgaggactttgaaaaacatgaaagtgtggagtataaacctcctaaaaaaccctttgtgaaattaaaagattgcattgaactttttacaacaaaagaaaagctaggtgctgaagatccctggtattgtccgaattgtaaagaacatcagcaagccacaaagaaattggatttatggtccctgcctccagtacttgtagtacatctcaagcgattttcttacagtcgatacatgagagacaagttggataccttagttgattttcctatcaatgacttggatatgtcggaattcttaattaatccaaatgcaggtccttgccgctataatctgattgctgtttccaaccactatggagggatgggaggaggacactatactgcttttgcaaaaaataaagatgatggaaaatggtactattttgatgacagtagtgtctccactgcatctgaagaccaaattgtgtccaaagcagcatatgtactcttctaccagagacaagacactttcagtggaactggcttttttcctcttgaccgagaaactaaaggtgcttcagctgccactggcatcccattagaaagtgatgaagatagcaatgataatgacaatgatatagaaaatgaaaactgtatgcacactaactaa

SEQ ID NO: 571 - DNA, 1119 bp, Homo sapiens;
atgagcaaggcgtttgggctcctgaggcaaatctgtcagtccatcctggctgagtcctcgcagtccccggcagatcttgaagaaaagaaggaagaagacagcaacatgaagagagagcagcccagagagcgtcccagggcctgggactaccctcatggcctggttggtttacacaacattggacagacctgctgccttaactccttgattcaggtgttcgtaatgaatgtggacttcaccaggatattgaagaggatcacggtgcccaggggagctgacgagcagaggagaagcgtccctttccagatgcttctgctgctggagaagatgcaggacagccggcagaaagcagtgcggcccctggagctggcctactgcctgcagaagtgcaacgtgcccttgtttgtccaacatgatgctgcccaactgtacctcaaactctggaacctgattaaggaccagatcactgatgtgcacttggtggagagactgcaggccctgtatacgatccgggtgaaggactccttgatttgcgttgactgtgccatggagagtagcagaaacagcagcatgctcaccctcccactttctctttttgatgtggactcaaagcccctgaagacactggaggacgccctgcactgcttcttccagcccagggagttatcaagcaaaagcaagtgcttctgtgagaactgtgggaagaagacccgtgggaaacaggtcttgaagctgacccatttgccccagaccctgacaatccacctcatgcgattctccatcaggaattcacagacgagaaagatctgccactccctgtacttcccccagagcttggatttcagccagatccttccaatgaagcgagagtcttgtgatgctgaggagcagtctggagggcagtatgagctttttgctgtgattgcgcacgtgggaatggcagactccggtcattactgtgtctacatccggaatgctgtggatggaaaatggttctgcttcaatgactccaatatttgcttggtgtcctgggaagacatccagtgtacctacggaaatcctaactaccactggcaggaaactgcatatcttctggtttacatgaagatggagtgctaa

SEQ ID NO: 572 - DNA, 2892 bp, Homo sapiens;
atggcggaaggtggaggctgccgtgagcgaccggatgcggagactcagaagtccgagcttggacccttaatgaggaccacactccaacgcggggcgcagtggtatcttattgacagccggtggttcaagcagtggaagaagtatgtgggctttgacagctgggacatgtacaatgtgggtgaacataacctatttcctggcccaatagacaactctgggctattttcagatcctgagagtcagaccttgaaagaacacttaattgatgaattggactatgtattggtccctaccgaggcgtggaataaactactaaactggtacggctgtgtagaaggccagcaacccatcgtcagaaaagttgtggagcatggcctgtttgtcaagcactgcaaagtcgaggtgtatttgctggaactgaagctctgtgagaacagtgaccccaccaatgtgctgagttgccatttcagcaaggcagacaccattgcaaccatcgagaaagagatgcggaagctattcaacatccctgcggagcgtgaaacacggctctggaacaaatacatgagcaacacctacgagcagttgagcaagctagacaacactgtccaggatgctgggctataccagggtcaggtgctagtaattgagcctcaaaatgaagatggcacatggcccaggcagaccttgcagtcaaaatcaagcactgcgcctagcagaaattttactacctctccaaaatcatcagcaagtccctattcctcagtgtctgcctctctcattgcaaatggtgatagcactagcacctgtgggatgcacagttccggtgtcagcaggggtggatctggcttttctgcttcgtataattgtcaggagccaccatcctctcatatacaacctgggctctgtggacttggaaacctgggaaacacctgcttcatgaactccgctttgcagtgtttgagcaacactgcaccactgactgactactttctcaaagatgagtatgaagccgaaatcaacagagacaaccctctggggatgaaaggggaaattgcagaagcctatgctgaactcattaagcagatgtggtctggaagggacgcccatgtggcacctcgcatgttcaaaactcaagtaggacgttttgctcctcaattttctggctaccagcaacaagattctcaggagctgctggcctttcttctagatggattgcatgaagatctgaaccgggtaaagaaaaagccctacttggagctgaaggatgccaatgggcggccagatgcggtggtggcaaaggaagcctgggagaatcacaggttgaggaatgattctgtgattgtggatactttccatggcctcttcaaatctactttggtttgcccagaatgtgctaaggtttctgtgacctttgacccattttgctatctaacgctgccactgcccttgaagaaagatcgagttatggaggttttcctggttcctgctgaccctcactgcagacctactcagtaccgtgtgactgtgccgctgatgggggctgtgtccgacctgtgcgaggctctctccaggctgtctggcattgctgcagaaaatatggtggtcgcagatgtgtataatcaccgattccacaaaattttccaaatggatgaaggtttaaaccacatcatgcctcgggatgacattttcgtgtacgaggtctgcagcacttccgtggatggctcggaatgtgtcacgcttccagtctacttcagggagaggaagtccaggccatcaagcacttcctccgcatcagcgctatatgggcagccactattgctttctgtccccaagcacaagttaacccttgagtctttgtaccaggctgtttgtgatcgtatcagccgctatgtgaaacagcctttacctgatgagtttggcagctcacccttggagccaggggcctgcaatggctccaggaacagctgtgaaggagaagatgaggaagaaatggagcatcaggaagaaggcaaagagcagctttcagaaacagaaggcagtggggaagatgagccaggaaatgaccccagtgagaccacccaaaagaagatcaaaggccagccctgcccaaaaaggctttttaccttcagtcttgtgaactcctatggaacagctgacataaattcacttgcagctgatggaaaactacttaaactcaactctcgatctacactggccatggattgggacagtgaaactcggagactttactatgatgagcaagaatctgaggcctacgagaagcatgtgagcatgttgcagcctcagaagaagaagaagaccacagtggccctgagagactgcatcgagctcttcaccaccatggagacccttggggagcatgacccctggtactgtcccaactgtaagaagcatcaacaggccacaaaaaagtttgacctatggtccttgcccaagatcctggtggtccacctcaaacgtttctcctacaacagatactggagggataagctcgacacagtcgtagaattcccaatcagagggctgaacatgtccgagtttgtctgtaacctgtcagcaaggccttatgtgtacgacctcattgccgtgtccaatcattatggagccatgggggttggccactacactgcatatgcgaagaacaaactgaatggtaaatggtattactttgatgatagcaacgtgtccctggcctctgaggatcagatagtgactaaagcagcttatgtgctattttaccaacgtcgagatgatgaattttataagacaccttcacttagcagttctggttcctctgatggagggacacgaccaagcagctctcagcagggctttggggatgatgaggcttgcagcatggacaccaactaa

SEQ ID NO: 573 - DNA, 2316 bp, Homo sapiens;
atgactgcgaaccggcttgcagagagccttctggctttgagccaacaggaagaactagcggatttgccaaaagactacctcttgagtgagagtgaagatgagggggacaatgatggagagagaaagcatcaaaagcttctggaagcaatcagttcccttgatggaaagaataggcggaaattggctgagaggtctgaggctagtctgaaggtgtcagagttcaatgtcagttctgaaggatcaggagaaaagctggtccttgcagatctgcttgagcctgttaaaacttcatcttctttggccactgtgaaaaagcaactgagtagagtcaaatcaaagaagacagtggagttacctctgaacaaagaagagattgaacggatccacagagaagtagcattcaataaaaccgcacaagtcctctccaaatgggaccctgtcgtcctgaagaaccggcaggcagagcagctggtttttcccctggagaaagaggagccagccattgctcccattgaacatgtgctcagtggctggaaggcaagaactcccctggagcaggaaattttcaacctcctccataagaacaagcagccagtgacagaccctttactgacccctgtggaaaaggcctctctccgagccatgagcctagaagaggcaaagatgcgacgagcagagcttcagagggctcgggctctgcagtcctactatgaggccaaggctcgaagagagaagaaaatcaaaagtaaaaagtatcacaaagtcgtgaagaaaggaaaggccaagaaagccctaaaagagtttgagcagctgcggaaggttaatccagctgcagcactagaagaactggaaaaaattgaaaaggccagaatgatggaaagaatgagccttaagcaccaaaacagtgggaaatgggccaagtcaaaggcaattatggccaaatatgacctggaggctcgccaagctatgcaggaacagttgtctaagaacaaagaactgacacagaaactccaggtagcctctgagagtgaggaagaggagggaggcacagaagatgtggaagaactccttgtccctgatgtagtgaatgaagtgcagatgaatgcagatgggccgaatccctggatgctcaggagctgcaccagtgacaccaaagaggctgcaacccaggaggaccctgagcaactgccagagcttgaggcccatggagtttctgaaagtgagggagaagaaagaccagtggcagaagaagaaattttgttgagagaatttgaggaaaggcgatcccttagaaaaagatctgagctcagccaagatgctgagccagcaggcagtcaagaaacaaaagattctggcagccaggaggtgctgtctgaattgagagtactatctcagaaattgaaggaaaaccatcagtccaggaagcaaaaagcaagttcagaggggactattccccaggtccagagagaggaacctgccccagaagaagaggagcccctgttgctacagagaccagagagagtacagacgctggaagagctagaagagctgggaaaagaagaatgttttcaaaataaggagcttcccagacctgtgttagaagggcagcagtcagagaggaccccaaataatcgccctgatgcccctaaggagaagaaaaagaaggagcaaatgatcgacctacagaacctcctaaccacacaatctccctccgtgaagtctttggcagttcccacaatagaggagctggaagatgaagaggagagaaaccataggcagatgataaaggaagcttttgctggggatgatgtcatcagagatttcttgaaagagaagagggaagctgtggaggcgagtaagccaaaggacgtggacctgacactacctggctggggcgagtggggtggtgtgggcctaaagcccagtgccaagaaaagacgccggtttctcattaaagcccctgagggtcctccaagaaaagataagaatttgccaaatgtgattatcaatgagaagcgcaacatccacgcagctgctcatcaggtacgagtgcttccatatccatttacccaccattggcaatttgaaaggaccatccagacccccataggatccacatggaacacccagagggctttccaaaagctgactactcccaaggtcgtcaccaagccaggccatatcattaaccccataaaagcagaagacgtgggctaccggtcttcctcaaggtcggacctgtctgtcatacagaggaatccaaaacgaatcaccacacgtcacaaaaaacagctgaagaaatgctctgtagattga

SEQ ID NO: 574 - DNA, 303 bp, Homo sapiens;
atgtctacaggtccaactgctgccactggcagtaatcgaagacttcagcagacacaaaatcaagtagatgaggtggtggacataatgcgagttaacgtggacaaggttctggaaagagaccagaagctctctgagttagacgaccgtgcagacgcactgcaggcaggcgcttctcaatttgaaacgagcgcagccaagttgaagaggaaatattggtggaagaattgcaagatgtgggcaatcgggattactgttctggttatcttcatcatcatcatcatcgtgtgggttgtctcttcatga

SEQ ID NO: 575 - DNA, 2544 bp, Homo sapiens;
atggagccgtggaagcagtgcgcgcagtggctcatccattgcaaggtgctgcccaccaaccaccgggtgacctgggactcggctcaggtgttcgaccttgcgcagaccctccgcgatggagtcctgctctgccagctgcttaacaacctccgggcgcactccatcaacctgaaggagatcaacctgaggccgcagatgtcccagtttctctgtttgaagaacataaggacatttctcacggcctgttgtgagacgtttggaatgaggaaaagtgaacttttcgaggcatttgacttgtttgatgttcgtgactttggaaaggttatagaaacattatcacgactttctcgaacacctatagcattggccacaggaatcaggcccttcccaacagaagaaagcattaatgatgaagacatctacaaaggccttcctgatttaatagatgaaacccttgtggaagatgaagaagatctctatgactgtgtttatggggaagatgaaggtggagaagtctatgaggacttaatgaaggcagaggaagcacatcagcccaaatgtccagaaaatgatatacgaagttgttgtctagcagaaattaagcagacagaagaaaaatatacagaaactttggagtcaatagaaaagtatttcatggcaccactaaaaagatttctgacagcagcagaatttgattcagtattcatcaacattcctgaacttgtaaaacttcatcggaacctaatgcaagagattcatgattccattgtaaataaaaatgaccagaacttgtaccaagtttttattaactacaaggaaagattggttatttacgggcagtactgcagtggagtggagtcagccatctctagtttagactacatttctaagacaaaagaagatgtcaaactgaaattagaggaatgttccaaaagagcaaataatgggaaatttactcttcgagacttgcttgtggttcctatgcaacgtgttttaaagtaccaccttctcctccaggaactggtcaaacataccactgatccgactgagaaggcaaatctgaaactggctcttgatgccatgaaggacttggcacaatatgtgaatgaagtgaaaagagataatgagacccttcgtgaaattaaacagtttcagctatctatagagaatttgaaccaaccagttttgctttttggacgacctcagggagatggtgaaattcgaataaccactctagacaagcataccaaacaagaaaggcatatcttcttatttgatttggcagtgatcgtatgtaagagaaaaggtgataactatgaaatgaaggaaataatagatcttcagcagtacaagatagccaataatcctacaaccgataaagaaaacaaaaagtggtcttatggcttctacctcatccatacccaaggacaaaatgggttagaattttattgcaaaacaaaagatttaaagaagaaatggctagaacagtttgaaatggctttgtctaacataagaccagactatgcagactccaatttccacgacttcaagatgcataccttcactcgagtcacatcctgcaaagtctgccagatgctcctgaggggaacattttatcaaggctatttatgttttaagtgtggagcgagagcacacaaagaatgtttgggaagagtagacaattgtggcagagttaattctggtgaacaagggacactcaaactaccagagaaacggaccaatggactgcgaagaactcctaaacaggtggatccaggtttaccaaagatgcaggtcattaggaactattctggaacaccacccccagctctgcatgaaggaccccctttacagctccaggccggggataccgttgaacttctgaaaggagatgcacacagtctgttttggcagggcagaaatttagcatctggagaggttggattttttccaagtgatgcagtcaagccttgcccatgtgtgcccaaaccagtagattattcttgccaaccctggtatgctggagcaatggaaagattgcaagcagagaccgaacttattaatagggtaaatagtacttaccttgtgaggcacaggaccaaagagtcaggagaatatgcaattagcattaagtacaataatgaagcaaagcacatcaagattttaacaagagatggcttttttcacattgcagaaaatagaaaatttaaaagtttaatggaacttgtggagtactacaagcatcattctctcaaggaagggttcagaaccttagatacaactctgcagtttccatacaaggagccagaacattcagctggacagaggggtaatagagcaggcaacagcttgttaagtccaaaagtgctgggcattgccatcgctcggtatgacttctgtgcaagagatatgagagagttgtccttgttgaaaggagatgtggtgaagatttacacaaagatgagtgcaaatggctggtggagaggagaagtaaatggcagggtgggctggtttccatccacatatgtggaagaggatgaataa

SEQ ID NO: 576 - DNA, 1566 bp, Homo sapiens;
atggaggccaactggaccgcgttcctgttccaggcccatgaagcttcccatcaccaacagcaggcagcacagaacagcttgctgcccctcctgagctctgccgtggagccccctgatcagaaaccattgcttccaataccaataactcagaaacctcagggtgcaccagaaacattaaaggatgccattgggattaaaaaagaaaaacccaaaacttcatttgtgtgcacttactgcagtaaagctttcagggacagctatcacctgaggcgccacgaatcctgccacacagggatcaagttggtgtcccggccaaagaaaacccccaccacggtggttccccttatctctaccatcgctggggacagcagccgaacttcgttggtctcgaccattgcaggcatcttgtcaacagtcactacatcttcctcgggcaccaaccccagtagcagtgccagcaccacagctatgccagtgacccagtctgtcaagaaacccagtaagcctgtcaagaagaaccatgcttgtgagatgtgtgggaaggccttccgagatgtgtaccatctcaatcgacacaagctctcccattcagatgagaaaccctttgagtgtcctatttgtaatcagcgcttcaagaggaaggaccggatgacttaccatgtgaggtctcatgaaggaggcatcaccaaaccctatacttgcagtgtttgtgggaaaggcttctcaaggcctgaccacttaagctgtcatgtaaaacatgtccattcaacagaaagacccttcaaatgccaaacgtgcactgctgcctttgccaccaaagacagactgcggacacacatggtgcgccatgaaggcaaggtatcatgtaacatctgtgggaagctcctgagtgcagcatacatcaccagccacttaaagactcatgggcagagccaaagtatcaactgtaatacatgtaaacaaggcatcagtaaaacatgcatgagtgaagagaccagtaaccaaaagcagcagcagcagcagcagcagcagcagcagcagcagcaacaacaacaacaacaacatgtgacaagctggccagggaagcaagtagaaacactgagactgtgggaagaagctgttaaagcaaggaagaaagaagctgctaacctgtgccaaacctccacggctgctacgacacctgtgactctcactactccattcagtataacatcctctgtgtcgtctgggactatgtcaaacccagtcacagtggcagctgcaatgagcatgagaagtccagtaaatgtttcaagtgcagttaacataaccagcccaatgaacatagggcatcctgtaactataaccagtccattatccatgacctctcctttaacactcactaccccagtcaacctccccacccccgtcactgccccagtgaatatagcacaccctgtcaccatcacatctccaatgaatctacccacacctatgacattagccgcccctctcaatatagcaatgagacctgtagagagcatgcctttcttgccccaagctttgcctacatcaccgccttggtaa

SEQ ID NO: 577 - DNA, 4281 bp, Homo sapiens;
atggaaaatgaaccagaccatgaaaatgtggaacagagcctctgtgccaagacgagcgaagaagagctgaataagtctttcaatctagaagcttcactttcaaaattctcttacatagatatggacaaggaactggagttcaaaaatgatctgattgatgacaaggagtttgatattcctcaagttgatactcctccaacactggaaagcatactaaatgagactgatgatgaagatgagtcttttattcttgaggatcctacattgttaaacattgatactattgattctcactcctatgatacttcatctgtggcaagctcagatagtggtgacaggaccaacttaaaaaggaagaagaaattacctgattctttttcacttcatggatcagttatgcgccattcacttttgaagggaatttctgcccagatagtgtctgcagctgacaaagtagatgctggcttgcctacagcaattgcagtatccagtctgatagcagtgggtacatctcatggattggctttaatatttgatcagaatcaagctttgcgactctgtctgggtagcactagtgttggaggtcagtatggcgctatctctgccctcagtatcaacaatgattgctcaagacttctttgtggctttgctaaaggacagatcaccatgtgggatttggccagtggaaaacttctaagatcaataacagatgctcatcctccaggaacagcaatattgcatatcaagtttacagatgatccaactcttgcaatttgcaacgacagcggaggctctgtttttgaattgacatttaagagagtgatgggagtgagaacctgtgaatctagatgtctgttcagtggttccaagggtgaagtctgctgtattgagcctctgcattctaagcctgagttgaaagatcatcccatcacacagttttcattattggccatggcatccttgacaaaaatactggtcattggattgaaaccatccttgaaagtatggatgacttttccctatggccggatggatccttccagtgtgccactgctggcctggcactttgtagcagtacaaaattacgtgaatcccatgcttgccttctgcagaggagatgttgttcattttctattggtaaagagagatgaatctggagcaatacatgttactaagcaaaagcatcttcacctatactatgacctcatcaactttacctggataaattcacgcacagttgtgctcttagacagcgtagagaagttgcatgtgattgatcggcaaacacaagaggaattggagacagtggagatctcagaagttcagctggtctacaatagcagccatttcaaatcactagccactggaggaaatgttagccaggcactggctttggttggagagaaggcttgttatcaatccatcagtagctatggtggtcagatcttttatttggggacaaaatctgtttatgtgatgatgctgaggagctggagagagagagtggatcatctcctgaaacaagattgtcttacagaagcgttggctcttgcgtggtctttccatgaaggaaaagcaaaagcagtagtgggattatcaggggatgccagtaagcgaaaggctattgttgcagaccggatggtagaaatcctattccattatgcagatcgagctctgaaaaagtgcccagaccaaggaaaaatccaagtgatggagcagcattttcaggatatggtgcctgtcatagttgattactgccttctgctgcagcgaaaggatcttttatttagtcagatgtatgataaattaagtgagaattcagtggccaaaggagtatttttggagtgccttgagccatatattttaagtgataaattggtgggaatcacaccccaagtaatgaaagacttgattgttcatttccaagataaaaaattaatggaaaatgtggaagcgctcattgtacatatggatatcaccagcctagatattcagcaggtagttctcatgtgttgggaaaatcgtttatatgatgctatgatctatgtctacaacagaggcatgaatgaatttattagtccaatggagaaacttttcagagtcattgctcctcctctgaatgcaggaaaaacactaacagatgaacaagttgttatgggcaataagctccttgtatatattagctgttgtctagcaggtcgtgcctatccccttggtgacatccctgaagatctggttcccttggttaaaaaccaggtttttgaatttctaattcgcctgcattcagcagaggcttctcctgaggaagaaatctatccttacattcggactttgctacattttgacacaagagaatttctaaatgtattggcactgacttttgaagattttaaaaatgacaagcaagctgtggaatatcaacagcgaattgtggatattttgttgaaagttatggtggagaattcagactttaccccctcacaagtaggatgtctctttaccttccttgctcggcagcttgcaaagcctgacaacaccttgtttgtaaacagaacactttttgatcaggtccttgaattcctttgtagtcctgacgatgactcccgacactctgaaagacagcaggtccttttagaattgctgcaggctggaggcatagttcaatttgaagagagtcgactcatccggatggcagaaaaagctgagttctatcaaatttgtgaatttatgtatgaaagagaacaccaatatgataaaattattgattgctacttacgtgaccctctgcgagaggaagaagtctttaattacattcacaatatcttatccattcccggacacagtgcagaggagaagcagtctgtatggcagaaagcaatggatcatattgaggaactcgtgtccctgaagccttgtaaagctgcggagctggttgccacccacttttctggacatattgaaacggtcattaaaaaacttcagaaccaggttttgcttttcaaatttttgaggagtcttcttgacccaagggaaggtattcatgtaaatcaagaattactgcaaatatctccttgtatcacagagcagttcattgagctgttgtgtcagttcaacccaacccaagttatagagactctgcaagtccttgagtgctaccgtctggaagaaactattcagattactcagaagtatcaacttcatgaagtcaccgcttatctattggaaaagaaaggagatattcatggtgccttcctaataatgttagagagactacaaagcaaacttcaagaggtaacacatcaaggtgaaaataccaaagaggatccctcattgaaggatgttgaagatactatggtggagaccattgctctttgccagagaaattcacataatttgaaccagcagcaacgtgaggcactttggtttccgttattggaggcaatgatggcccctcagaagctgtccagttcagccattcctcatctacactctgaagctctgaagtctttgaccatgcaagttttaaatagcatggcagcatttattgcccttccatcaatcttgcaaagaatcttacaggatccagtttatggaaaaggaaaacttggagaaatccagggacttatcttgggaatgttagatacctttaactatgaacaaaccctgctggaaacaacaaccagccttctaaaccaagatctccattggtcattgtgtaacctgagagcttcggtcaccagaggactgaatcccaaacaagattactgctctatatgtttgcagcagtacaagagacgccaagaaatggctgatgaaataattgtctttagctgtggccatttgtatcactcattctgcctacaaaacaaagaatgcactgtggaatttgagggccaaacaagatggacatgctacaaatgcagttcaagtaacaaagtaggaaaactcagtgaaaattcatctgaaattaaaaagggaaggataaccccatcacaggtaaaaatgtctccatcgtatcatcagtccaaaggggatcccactgctaaaaagggaacctcagaacctgttctggatccacagcaaatccaagcatttgatcagctttgccgtctctaccgaggaagctccaggctggctctcctcacggaactctcccagaatcgcagcagcgagagctataggccattcagtggctcgcagagtgctcctgctttcaacagcatcttccagaatgagaacttccagctgcagctcattcctccacctgtgactgaggattga

SEQ ID NO: 578 - DNA, 1497 bp, Homo sapiens;
atgccgttagtaacgaggaacatcgagccaaggcacctgtgccgtcagacgttgcctagcgttagaagcgagctggaatgcgtgaccaacatcaccctggcaaatgtcatccgacagctgggcagcctgagtaaatatgcagaggacatttttggagagctctttactcaggcaaatacctttgcctctcgggtaagctcccttgctgagagggtcgaccgactacaggttaaagtcactcagctggatcccaaggaagaagaagtgtcactgcaaggaatcaacacccgaaaagccttcagaagttccaccattcaagaccagaagctttttgacagaaactctctcccagtgcctgtcttagaaacatacaatacctgtgatactcctccccctctcaacaatcttaccccttacagggacgatggaaaagaggcactcaaattctacacagacccttcatacttctttgatctttggaaggagaagatgctgcaggacaccaaggatatcatgaaagagaagagaaagcataggaaagaaaagaaagataatccaaatcgagggaatgtaaacccacgtaaaatcaagacacgtaaggaagagtgggagaaaatgaagatggggcaagaatttgtggagtccaaagaaaagctggggacttctgggtatccacccactttggtgtaccagaatggcagcattggctgtgttgaaaacgtggatgcaagtagctatccgccaccaccacagtcagactctgcttcttcaccttctccttccttctccgaggacaacttgcctcctccaccagcagaattcagttacccagtggacaaccaaagaggatctggtttggctggacccaaaagatccagtgtggtcagcccaagccatccaccaccagctcctcctctaggctctccaccaggccctaaacccgggtttgctccaccacctgcccctccgccacctccgcctccaatgataggcatcccacctccaccaccgcctgtaggatttgggtctccagggacgcctccaccaccctcacccccatctttcccacctcaccctgattttgctgcccctccacctcctcctccaccaccagcagctgactacccaactctgccaccacctcccttgtcccagccaacaggaggagcacctcctcctccccctcctcctcctcctccggggccccctcctccccctttcactggtgcagatggccagcctgctataccaccaccgctttctgataccaccaagcccaagtcctccttgcctgccgtgagcgatgcccgtagcgacctgctttcagccatccgtcaaggttttcagctgcgcagggttgaggagcagcgggaacaagagaagcgggatgttgtgggcaatgacgtggccaccatcttgtctcgtcgcattgctgttgagtacagtgactcagaagatgactcctctgaatttgatgaggacgactggtccgattaa

SEQ ID NO: 579 - DNA, 786 bp, Homo sapiens;
atggcgctcaacaagaatcactcggagggcggcggagtgatcgtcaataacaccgagagcatcctaatgtcctatgatcacgtggaactcacattcaatgacatgaagaacgtgccagaagccttcaaagggaccaagaaaggcactgtctaccttaccccttaccgggtcatctttctgtccaagggcaaggatgccatgcagtccttcatgatgccattttatctcatgaaagactgtgagatcaagcagcccgtatttggtgcaaactacatcaagggaacagtgaaggcggaagcgggaggtggctgggaaggctctgcttcctacaagttgactttcacggcagggggcgccattgagttcggacagcggatgctccaggtggcatctcaagcctccagaggtgaagtccccagtggagcctatggctactcttacatgcccagcggggcctatgtctatcccccgccagtcgccaatggaatgtacccctgccctcctggctacccctatccaccgcccccacctgagttctatccaggaccccccatgatggacggggccatgggatacgtgcagcccccaccaccgccctaccctgggcccatggaacctccggtcagcggccccgatgtcccctccactcctgcagccgaagccaaggccgcagaagcagccgccagcgcctattacaacccaggcaatcctcacaacgtctacatgcccacgagccagccgccgccacctccctactacccaccggaagataagaagacccagtag

SEQ ID NO: 580 - DNA, 1485 bp, Homo sapiens;
atgcccacagaaagcgcaagttgttcgactgctcgccaaacaaaacagaagcgcaaatcccatagcctttctatacgaagaactaacagctcggagcaggagaggacgggactgccaagagacatgttagaaggacaagattctaaactgccttcctcggttcgcagtacacttctggaactgtttggtcaaatagaaagagaatttgaaaacctttatatcgaaaacttagaattacgtagagaaatcgacactcttaatgaacgtttagctgctgaaggacaagcgattgatggagcagagctgagtaagggccaactcaaaacaaaagccagtcacagcaccagccagctctcccagaaactgaagaccacttacaaggcttccaccagcaagattgtctccagctttaagaccacgacatcgagagctgcctgccagctcgtgaaggagtacatcggccaccgggacggcatctgggatgtcagcgtggccaagacacagccagtggtgctcgggactgcatcagccgatcacacggctttgctgtggagcatagagacagggaagtgcctagtcaagtacgcaggccacgtgggctcagtaaattctatcaaatttcatccctcagagcagttggctctcactgcttctggagatcagactgctcatatctggagatacgcggtgcagctgccgacaccccagcctgttgctgacactagtatatctggggaagatgaagtagagtgctctgacaaggacgagcccgacctcgatggggatgtgtccagcgactgccccaccatccgcgtcccactgacatccctcaagagccaccagggcgtggtcatcgcctccgactggctggttggggggaagcaggctgtgactgcctcctgggaccggacggcaaacctgtacgacgtggagacgtccgagctcgttcactctctgacagggcacgaccaggagttgacgcactgctgcacacaccccacccagcggctcgtggtgacctcctcccgtgacacgactttccgcctctgggatttcagggacccctccatccactcggtgaatgttttccagggacacacggacactgtgacttctgccgtgttcaccgtgggagacaacgtggtttcaggcagcgatgaccgcacggtgaaagtctgggacttgaaaaatatgagatcccccattgcaactattcgcacggactctgccattaacaggatcaatgtatgtgtcggccaaaaaatcatagccctcccccatgacaaccgacaagtgagactgtttgatatgtcaggagtgcgcctggcgcggcttccccggagcagccgacagggccacaggagaatggtatgctgctcggcatggagtgaagaccaccccgtgtgcaatctgttcacctgtgggtttgaccggcaagccattggttggaacatcaacatccctgcattgctacaagaaaaataa

SEQ ID NO: 581 - DNA, 2763 bp, Homo sapiens;
atgacggctgaagaaacagtgaatgtaaaagaggttgaaatcattaagctaattttggacttcctgaattcaaagaagcttcacattagtatgctggccctggagaaggaaagtggagtcataaatggcctgttttcagatgatatgcttttcctgaggcagctaatacttgatggtcaatgggatgaagttcttcagttcattcagcctctagaatgtatggaaaaatttgacaaaaaaaggtttcgttatattatcctgaagcagaagtttttagaagctttatgtgttaacaacgcgatgtcagcagaagatgagccccagcatctggaatttaccatgcaagaagctgtgcaatgtttacatgctctagaagaatactgtccttctaaagatgactatagtaagctctgtttgcttttgactttgcctcgtctgaccaatcatgccgagtttaaggactggaatcccagcaccgcacgagttcactgttttgaagaggcttgtgtcatggttgcagaattcatccctgctgataggaagctaagtgaagctggttttaaggctagtaacaatcgtttatttcagcttgtaatgaaaggcctgctttatgaatgctgtgtagaattttgtcagagtaaagcaactggagaagaaattacagaaagcgaagtgcttcttggcatcgacctcttatgtggtaatggttgtgatgatttggatctgagtttactgtcatggcttcagaatcttccatcttctgtcttctcttgtgcttttgaacagaaaatgcttaatattcatgttgacaaacttctgaaacctacaaaagctgcatatgctgatcttttgactcctcttatcagcaaactctctccctatccatcatccccaatgagaagacctcaatcagctgatgcctatatgacccgctctctgaatcctgctttagatggcctcacctgtggactaaccagtcatgataagagaatttcagaccttggaaacaaaacttctccaatgtcacactcctttgctaacttccattatccaggggtacaaaacctcagtagaagtctcatgcttgagaatacagaatgtcacagtatttacgaagaatcccctgagcgaagtgatacacctgttgatgcacagaggcctatcggcagtgaaatcttgggccagagttcagtttcagaaaaagagcctgcaaatggagcacagaatccaggaccagctaaacaagaaaaaaatgagcttcgagattcaacagaacaatttcaagaatattataggcaaagattacgctatcaacagcatttagaacagaaggagcaacagcggcagatataccaacagatgttgcttgaaggaggcgtgaatcaggaggatggtcctgatcagcagcagaatcttactgaacagttccttaataggtccattcaaaagcttggtgaattaaatattggaatggatggccttggtaatgaggtatcagcactcaaccagcaatgtaatgggagcaaaggcaatggatctaatggttcttctgtgactagttttactacaccaccccaagactctagtcagagattaacacatgatgcttcaaatattcatacaagcactcctcgtaatcctggatcaacaaatcacataccttttctggaggaatcaccttgtggaagccaaatctcttcagaacattcggtcattaagccacctcttggagattctccagggagtctttcaaggtcgaaaggggaagaggatgacaaatcaaaaaagcagtttgtttgtattaatatcctagaagacacacaagctgttagagcagtggcttttcatccagctggaggtttatatgctgttggttcaaattcaaaaactctgagagtatgtgcctatccagatgtaattgatccaagtgcacatgagactcctaagcagccggtggtacgttttaaaaggaataaacatcataaaggatccatttactgtgtggcctggagtccttgtgggcagttattagcaacaggatcaaatgacaaatacgtcaaagtgctgcccttcaatgcagagacttgtaacgcaacaggaccagatctggaatttagtatgcatgatggaacaattagagacttggcatttatggaaggcccagaaagcggaggagctattttaataagtgctggagcaggggattgtaacatttatacaaccgattgtcaaagaggacagggcctccatgctttgagtggacatactgggcatattttagcactttatacctggagtggctggatgattgcatctggttcccaagataagactgttagattttgggatcttcgagtaccaagttgtgttcgtgttgttggcacaacatttcatggaactggcagtgcagtggcatctgtagctgtagatcccagtggtcgtctcttagccacaggtcaagaagattctagctgcatgttgtatgacataagaggaggaagaatggtacaaagttatcatcctcattccagtgatgttcgctctgttcgattctcccctggagctcactacttgctaacaggctcttatgatatgaaaataaaggtgacagacctacaaggggacctcaccaagcagcttcctatcatggtggtgggggagcacaaggacaaagtgattcagtgcagatggcacacccaggatctttccttcctgtcatcctctgcagatagaactgtcaccctctggacttacaatgggtag

SEQ ID NO: 582 - DNA, 906 bp, Homo sapiens;
atggaaggagacttctcggtgtgcaggaactgtaaaagacatgtagtctctgccaacttcaccctccatgaggcttactgcctgcggttcctggtcctgtgtccggagtgtgaggagcctgtccccaaggaaaccatggaggagcactgcaagcttgagcaccagcaggttgggtgtacgatgtgtcagcagagcatgcagaagtcctcgctggagtttcataaggccaatgagtgccaggagcgccctgttgagtgtaagttctgcaaactggacatgcagctcagcaagctggagctccacgagtcctactgtggcagccggacagagctctgccaaggctgtggccagttcatcatgcaccgcatgctcgcccagcacagagatgtctgtcgcagtgaacaggcccagctcgggaaaggggaaagaatttcagctcctgaaagggaaatctactgtcattattgcaaccaaatgattccagaaaataagtatttccaccatatgggtaaatgttgtccagactcagagtttaagaaacactttcctgttggaaatccagaaattcttccttcatctcttccaagtcaagctgctgaaaatcaaacttccacgatggagaaagatgttcgtccaaagacaagaagtataaacagatttcctcttcattctgaaagttcatcaaagaaagcaccaagaagcaaaaacaaaaccttggatccacttttgatgtcagagcccaagcccaggaccagctcccctagaggagataaagcagcctatgacattctgaggagatgttctcagtgtggcatcctgcttcccctgccgatcctaaatcaacatcaggagaaatgccggtggttagcttcatcaaaaggaaaacaagtgagaaatttcagctag

SEQ ID NO: 583 - DNA, 2823 bp, Homo sapiens;
atggctcggaaacgcgcggccggcggggagccgcggggacgcgaactgcgcagccagaaatccaaggccaagagcaaggcccggcgtgaggaggaggaggaggatgcctttgaagatgagaaacccccaaagaagagccttctctccaaagtttcacaaggaaagaggaaaagaggctgcagtcatcctgggggttcagcagatggtccagcaaaaaagaaagtggccaaggtgactgttaaatctgaaaacctcaaggttataaaggatgaagccctcagcgatggggatgacctcagggactttccaagtgacctcaagaaggcacaccatctgaagagaggggctaccatgaatgaagacagcaatgaagaagaggaagaaagtgaaaatgattgggaagaggttgaagaacttagtgagcctgtgctgggtgacgtgagagaaagtacagccttctctcgatctcttctgcctgtgaagccagtggagatagagattgaaacgccagagcaggcgaagacaagagaaagaagtgaaaagataaaactggagtttgagacatatcttcggagggcgatgaaacgtttcaataaaggggtccatgaggacacacacaaggttcaccttctctgcctgctagcaaatggcttctatcgaaataacatctgcagccagccagatctgcatgctattggcctgtccatcatcccagcccgctttaccagagtgctgcctcgagatgtggacacctactacctctcaaacctggtgaagtggttcattggaacatttacagttaatgcagaactttcagccagtgaacaagataacctgcagactacattggaaaggagatttgctatttactctgctcgagatgatgaggaattggtccatatattcttactgattctccgggctctgcagctcttgacccggctggtattgtctctacagccaattcctctgaagtcagcaacagcaaagggaaagaaaccttccaaggaaagattgactgcggatccaggaggctcctcagaaacttccagccaagttctagaaaaccacaccaaaccaaagaccagcaaaggaaccaaacaagaggaaacctttgctaagggcacctgcaggccaagtgccaaagggaagaggaacaagggaggcagaaagaaacggagcaagccctcctccagcgaggaagatgagggcccaggagacaagcaggagaaggcaacccagcgacgtccgcatggccgggagcggcgggtggcctccagggtgtcttataaagaggagagtgggagtgatgaggctggcagcggctctgattttgagctctccagtggagaagcctctgatccctctgatgaggattccgaacctggccctccaaagcagaggaaagcccccgctcctcagaggacaaaggctgggtccaagagtgcctccaggacccatcgtgggagccatcgtaaggacccaagcttgccagcggcatcctcaagctcttcaagcagtaaaagaggcaagaaaatgtgcagcgatggtgagaaggcagaaaaaagaagcatagctggtatagaccagtggctagaggtgttctgtgagcaggaggaaaagtgggtatgtgtagactgtgtgcacggtgtggtgggccagcctctgacctgttacaagtacgccaccaagcccatgacctatgtggtgggcattgacagtgacggctgggtccgagatgtcacacagaggtacgacccagtctggatgacagtgacccgcaagtgccgggttgatgctgagtggtgggccgagaccttgagaccataccagagcccatttatggacagggagaagaaagaagacttggagtttcaggctaaacacatggaccagcctttgcccactgccattggcttatataagaaccaccctctgtatgccctgaagcggcatctcctgaaatatgaggccatctatcccgagacagctgccatccttgggtattgtcgtggagaagcggtctactccagggattgtgtgcacactctgcattccagggacacgtggctgaagaaagcaagagtggtgaggcttggagaagtaccctacaagatggtgaaaggcttttctaaccgtgctcggaaagcccgacttgctgagccccagctgcgggaagaaaatgacctgggcctgtttggctactggcagacagaggagtatcagcccccagtggccgtggacgggaaggtgccccggaacgagtttgggaatgtgtacctcttcctgcccagcatgatgcctattggctgtgtccagctgaacctgcccaatctacaccgcgtggcccgcaagctggacatcgactgtgtccaggccatcactggctttgatttccatggcggctactcccatcccgtgactgatggatacatcgtctgcgaggaattcaaagacgtgctcctgactgcctgggaaaatgagcaggcagtcattgaaaggaaggagaaggagaaaaaggagaagcgggctctagggaactggaagttgctggccaaaggtctgctcatcagggagaggctgaagcgtcgctacgggcccaagagtgaggcagcagctccccacacagatgcaggaggtggactctcttctgatgaagaggaggggaccagctctcaagcagaagcggccaggatactggctgcctcctggcctcaaaaccgagaagatgaagaaaagcagaagctgaagggtgggcccaagaagaccaaaagggaaaagaaagcagcagcttcccacctgttcccatttgagcagctgtga

SEQ ID NO: 584 - DNA, 3378 bp, Homo sapiens;
atggcatctgaagaagcctctctcagggcattggaaagtctgatgacagaattttttcacgattgtacaaccaatgaaagaaaacgtgagatagaggagcttcttaataactttgcccagcaaataggagcctggagattctgcctgtactttctctccagcactaggaatgactatgtaatgatgtacagtttaacagtttttgagaatctgatcaataaaatgtggcttggggtcccatctcaggataagatggaaatccgtagctgtctgcccaaactccttttggctcaccataaaaccttaccttactttatccggaacaagctctgcaaagttattgttgatattggacgtcaggattggcccatgttctaccacgacttttttactaacattttacagttgatccagtcccctgtgacaaccccccttgggctgatcatgttgaagacaacttcagaagagctggcttgtccccgtgaggacctcagtgtggctcggaaggaggagttgcggaagctgctactggaccaggtgcagacagtgcttgggctactgacaggtatcttggagactgtctgggacaaacacagtgttactgctgccactccaccaccatccccgacctcaggagaaagtggtgacttactgagtaacctgttgcagagtcccagttcagccaaactgttgaatcagccaattcccatccttgatgtggagagtgagtatatctgttccctggctttggagtgcctggcccatctcttcagttggattcctctgtctgccagcatcaccccatccctccttaccaccatcttccactttgcacgatttggctgtgacatccgggccagaaagatggcgtcagttaacggcagcagccagaactgtgtctcgggtcaggagcgcggccggctgggggtcctggccatgtcctgcatcaatgaactcatgtccaagaactgtgtgcctatggaatttgaggagtatttactgcgtatgttccagcagactttctacctcctgcagaaaatcaccaaggataacaatgcccacacagtgaagagcaggctagaagagctcgatgagagctatatcgagaagtttactgactttcttcggctctttgtgagtgttcacctaagaagaatcgagtcttactcccagttccctgtggtggagtttttgacacttttgttcaagtacacatttcatcagcctactcatgaaggttacttctcttgtttggatatctggacgctgtttttggactatctgacaagtaaaattaaaagtcgtcttggagacaaggaagcagttctcaacaggtacgaagatgccctggtgctcctgctcacagaggtgttgaatcgaatccagttcagatacaaccaagcccagctggaggagttggatgatgagactctggatgacgatcagcagacggagtggcagcggtacttacggcagagcttggaggtggtggccaaagtgatggagctcctgcccacgcacgccttctccacactgttccctgttcttcaggacaatttagaagtttatttgggattacaacagtttatagtcacttcagggtcaggacacaggttgaacatcacggcggagaacgactgccggcggctgcactgctccctgagagacttgagctccctgctgcaggccgtgggccgcctggccgagtactttatcggggatgtgtttgctgcacggttcaatgatgccctcacagtcgtggaaaggttggtcaaagtcactctgtacggatctcagataaaattgtacaacattgaaactgctgtgccatcagtattgaaacctgacctcattgatgtgcatgctcagtccctggctgcgctgcaggcttactctcactggttagcacagtattgcagtgaagttcaccggcagaacacgcagcagttcgtgacactcatctctactaccatggatgcaatcacacctctaatcagcaccaaggtccaagacaagctgctgctatctgcgtgccacttactggtctcactggccaccaccgtgcggcccgtctttctgatcagcatccctgcagtgcagaaagtattcaacagaatcactgatgcctctgccctgcgacttgtcgataaggcccaggtgttggtgtgccgagccctctctaacatcttgctgcttccgtggccaaaccttccagagaatgagcagcagtggcccgtgcgctccatcaaccacgccagcctcatctctgcactctcccgggactatcgcaacctgaagcccagtgctgttgccccacagagaaagatgccactggatgacaccaaactgattatccaccagacactcagcgtcttagaagatattgtggagaatatctcgggggagtccaccaagtctcgacagatttgctaccagtcgctgcaggaatctgttcaggtctccctggccctctttccagcttttatccatcagtcagatgtgactgatgagatgctgagcttcttcctcactctgtttcgaggccttagagtacagatgggtgtgcctttcactgagcaaatcatacagactttcctcaacatgtttaccagagagcagttagccgagagcatcctccacgagggcagcacaggctgccgggtggtggagaagtttctgaagatcctgcaggtggtggtccaggagccaggccaggtgttcaagcccttcctccccagcatcatcgccctgtgcatggagcaagtgtatcccatcattgccgagcgtccctcccctgatgtgaaggccgagctgtttgagctccttttccggacgctccatcacaactggaggtacttcttcaagtccaccgtgctggccagtgtccagagggggatcgctgaggagcagatggagaatgagccccagttcagtgccatcatgcaggctttcggacagtcctttctccagcccgacatccacctttttaaacaaaatctcttctacttggagactctcaacaccaagcagaagctgtaccacaagaagatcttccggactgccatgctgttccagtttgtgaacgtgctgctccaggtcctggtccacaagtcccatgatcttctgcaggaggagattggcatcgccatctacaacatggcctcagtcgactttgatggcttctttgccgccttcctcccagagttcctgaccagctgtgatggtgtggatgccaaccagaaaagtgtgctggggcggaatttcaagatggatcgggacctgccctcattcacccagaatgtgcacaggctggtcaacgacctgcgctactacagactctgcaacgacagcctgccccctggcactgtgaagctctag

SEQ ID NO: 585 - DNA, 366 bp, Homo sapiens;
atgggcagaattttccttgatcatatcggtggtacccgtctgttttcttgtgcaaactgtgatacgatcctgaccaaccgctcagaactcatctccactcgtttcacaggcgccactggcagagcatttctttttaacaaggtagttaacctgcagtacagtgaagttcaagatcgggtcatgctcactggccgccacatggttcgagatgtgagctgcaaaaactgcaatagcaaactgggatggatctatgagtttgccactgaagacagccagcgatataaggaaggccgcgtgatcctggaacgtgctctagttcgagagagtgagggctttgaggagcatgtaccatctgataactcttga

SEQ ID NO: 586 - DNA, 1758 bp, Homo sapiens;
atgtcagccactagcgtggatcagagacctaaagggcaaggaaataaagtttcagtacaaaacggttcgattcatcaaaaagatgctgtaaatgatgatgattttgagccatacttaagtagccagacaaatcagagtaacagctatccaccaatgtcagatccatacatgcctagttactatgctccatccattggatttccatattctcttggggaagcagcgtggtccacagctggagaccagcctatgccatatctgacaacctatggacaaatgagtaatggagaacatcactatataccagatggtgtatttagtcaacctggggcattaggaaatacccctccatttcttggtcaacatggatttaacttttttcctggtaatgctgatttctctacatgggggacaagtggatctcagggacaatcaacacaaagttctgcttatagtagcagttatggctatccacctagttctcttgggagagctattactgatggacaggctggatttggcaatgatactttgagtaaggtgcctggcattagcagtattgagcaaggcatgactggactgaaaattggtggtgacctgacagctgcagtgacaaaaactgtaggtacagctttgagcagcagtggtatgactagcattgcaaccaatagtgtgcccccagttagcagtgcagcacctaaaccaacctcctgggctgccattgccagaaagcctgccaaacctcaaccgaaacttaaacccaagggcaatgtgggaattgggggttctgctgtaccaccacctcctataaaacacaacatgaatattggaacttgggatgaaaaagggtcagtggtaaaggctccaccaacccaaccagttctgcctcctcaaactataatccagcagcctcagccattaattcaaccaccaccattggtgcaaagccaactgcctcaacagcagcctcaaccaccacaaccacagcagcaacaaggacctcagccacaggcccagcctcaccaagtgcagcctcaacagcagcagctgcagaatcgctgggtagctcctcgtaacaggggagcaggcttcaaccagaacaatggagcgggcagtgaaaactttggtttaggtgttgtacctgtcagtgcttcaccttctagtgtagaagtgcatcccgtgctggaaaagctaaaggccataaacaactataatcccaaagactttgattggaatctgaagaatggacgtgtgtttataattaaaagctactctgaggatgacatacatcgttccattaaatactctatctggtgtagtactgagcatggtaataagcgtttggatgcagcttaccgttccctgaatgggaaaggcccactctatttactcttcagtgtgaatggcagtggacatttttgtggagtggctgaaatgaagtctgttgtggactataatgcgtatgctggtgtctggtctcaggataagtggaagggcaaatttgaagttaaatggatctttgtcaaagatgttcccaataaccaattacggcatattcgcttagaaaataatgacaacaaaccggttaccaattcaagggacactcaagaggtacccctagaaaaagctaagcaagtgcttaaaataattgctactttcaagcataccacctcaatctttgatgactttgcacattatgaaaagcgtcaagaagaggaggaagccatgcgtagggagagaaatagaaacaaacaataa

SEQ ID NO: 587 - DNA, 1758 bp, Homo sapiens;; identical to SEQ ID NO: 586

SEQ ID NO: 588 - DNA, 1569 bp, Homo sapiens;
atggagtttccagaccatagtagacatttgctacagtgtctgagcgagcagagacaccagggttttctttgtgactgcactgttctggtgggagatgcccagttccgagcgcaccgagctgtactggcttcatgcagcatgtatttccacctcttttacaaggaccagctggacaaaagagacattgttcatctgaacagcgacattgttacagcccccgctttcgctctcctgcttgaattcatgtatgaagggaaactccagttcaaagacttgcccattgaagacgtgctagcagctgccagttatctccacatgtatgacattgtcaaagtctgcaaaaagaagctgaaagagaaagccaccacggaggcagacagcaccaaaaaggaagaagatgcttcaagttgttcggacaaagtcgagagtctctccgatggcagcagccacatagcaggcgatttgcccagtgatgaagatgaaggagaagatgaaaaattgaacatcctgcccagcaaaagggacttggcggccgagcctgggaacatgtggatgcgattgccctcagactcagcaggcatcccccaggctggcggagaggcagagccacacgccacagcagctggaaaaacagtagccagcccctgcagctcaacagagtctttgtcccagaggtctgtcacctccgtgagggattcggcagatgttgactgtgtgctggacctgtctgtcaagtccagcctttcaggagttgaaaatctgaacagctcttatttctcttcacaggacgtgctgagaagcaacctggtgcaggtgaaggtggagaaagaggcttcctgtgatgagagtgatgttggcactaatgactatgacatggaacatagcactgtgaaagaaagtgtgagcactaataacagggtacagtatgagccggcccatctggctcccctgagggaggactcggtcttgagggagctggaccgggaggacaaagccagtgatgatgagatgatgaccccagagagcgagcgtgtccaggtggagggaggcatggagagcagtctgctcccctacgtctccaacatcctgagccccgcgggccagatcttcatgtgccccctgtgcaacaaggtcttccccagcccccacatcctgcagatccacctgagcacgcacttccgcgagcaggacggcatccgcagcaagcccgccgccgatgtcaacgtgcccacgtgctcgctgtgtgggaagactttctcttgcatgtacaccctcaagcgccacgagaggactcactcgggggagaagccctacacatgcacccagtgcggcaagagcttccagtactcgcacaacctgagccgccatgccgtggtgcacacccgcgagaagccgcacgcctgcaagtggtgcgagcgcaggttcacgcagtccggggacctgtacagacacattcgcaagttccactgtgagttggtgaactccttgtcggtcaaaagcgaagcactgagcttgcctactgtcagagactggaccttagaagatagctctcaagaactttggaaataa

SEQ ID NO: 589 - DNA, 2709 bp, Homo sapiens;
atggcggacccggaggtgtgctgcttcatcaccaaaatcctgtgcgcccacgggggccgcatggccctggacgcgctgctccaggagatcgcgctgtctgagccgcagctctgtgaggtgctgcaggtggccgggcccgaccgctttgtggtgttggagaccggcggcgaggccgggatcacccgatcggtggtggccaccactcgagcccgggtctgccgtcgcaagtactgccagagaccctgcgataacctgcatctctgcaaactcaacttgctgggccggtgcaactattcgcagtccgagcggaatttatgcaaatattctcatgaggttctctcagaagagaacttcaaagtcctgaaaaatcacgaactctctggactgaacaaagaggaattagcagtgctcctcctccaaagtgatcctttttttatgcccgagatatgcaaaagttataagggagagggtcggcagcagatttgtaaccagcagccaccgtgttcaagactccacatctgtgaccacttcacccgagggaactgtcgttttcccaactgcctccggtcccataacctgatggacagaaaggtgctggccatcatgagggagcacgggctgaaccccgacgtggtccagaacatccaggacatctgcaacagcaagcacatgcagaagaatcccccagggcccagagctccttcttcacatcgtagaaacatggcatatagggctagaagcaagagtagagatcggttctttcagggcagccaagaatttcttgcgtctgcttcagcgtctgctgagaggtcctgcacacctagtccagatcagatcagccacagggcttccctggaggacgcgcctgtggacgatctcacccgcaagttcacgtatctggggagtcaggatcgcgctcggcctccctcaggctcgtccaaggctactgatcttggaggaacaagtcaggccgggacaagccagaggtttttagagaacggcagtcaagaggacctcttgcatggaaatccaggcagcacttaccttgcttccaattcaacatcagcccccaactggaagagcctcacatcctggacgaatgaccaaggcgccaggagaaagactgtgttttctcccacgctacctgccgcccgctcttctcttggctctctgcaaacacctgaagctgtgaccaccagaaagggcacaggcttgctttcctcagactacaggatcatcaatggcaaaagtggaactcaggacatccagcctggccctctttttaataataatgctgatggagtggccacagatataacttctaccagatccttaaattacaaaagcactagcagcggtcacagagaaatatcatcacctaggattcaggatgctggacctgcttcccgagatgtccaggccactggcagaatcgcagatgatgctgacccaagagtagcacttgttaacgattctttatctgatgtcacaagtaccacatcttctagggtggatgatcatgactcagaggaaatttgtcttgaccatctgtgtaagggttgtccgcttaatggtagctgcagcaaagtccacttccatctgccttaccggtggcagatgcttattggtaaaacctggacggactttgagcacatggagacgatcgagaaaggctactgtaaccccggaatccacctctgttctgtaggaagttatacaatcaattttcgggtaatgagttgtgattcctttcccatccgacgcctctccactccttcttctgtcaccaagccagccaattctgtcttcaccaccaaatggatttggtattggaagaatgaatctggcacatggattcagtatggagaagagaaagacaaacggaaaaattcaaacgtcgactcttcatacctggagtctctctatcaatcctgtccgaggggagttgtgccatttcaggcgggctcacggaactatgagctgagtttccaagggatgattcagacaaacatagcttccaaaactcaaaaggatgtcatcagaagaccaacatttgtgcctcagtggtatgtgcagcagatgaagagagggccagaccatcagccagcaaagacctcgtcagtgtctttaactgcgacctttcgtcctcaggaggacttttgcttcctatcctcaaagaaatataagttgtcagagatccatcacctacatccagaatatgtcagagtaagtgagcattttaaagcttccatgaaaaatttcaagattgaaaagataaagaagatcgagaactcagagctcctggataaatttacatggaagaaatcgcagatgaaggaagaaggaaaactcctattttatgcgacaagccgtgcctatgtggaatctatctgttcgaataattttgacagtttcctacatgaaactcatgaaaacaaatacggaaaaggaatttactttgcaaaagatgccatctattcccacaaaaattgcccgtatgatgccaaaaacgtcgttatgtttgtagcccaagttctggttggaaagtttactgaaggaaatataacgtacacgagccctcctccacagttcgacagctgtgtggataccagatcgaatccctccgtttttgtcatctttcagaaagatcaggtttacccacaatatgtgattgaatatactgaagacaaagcctgcgtgattagttag

SEQ ID NO: 590 - DNA, 1899 bp, Homo sapiens;
atgcagcgggaggagggatttaacaccaagatggcggacggcccggatgagtacgataccgaagcgggctgtgtgccccttctccacccagaggaaatcaaaccccaaagccattataaccatggatatggtgaacctcttggacggaaaactcatattgatgattacagcacatgggacatagtcaaggctacacaatatggaatatatgaacgctgtcgagaattggtggaagcaggttatgatgtacggcaaccggacaaagaaaatgttaccctcctccattgggctgccatcaataacagaatagatttagtcaaatactatatttcgaaaggtgctattgtggatcaacttggaggggacctgaattcaactccattgcactgggccacaagacaaggccatctatccatggttgtgcaactaatgaaatatggtgcagatccttcattaattgatggagaaggatgtagctgtattcatctggctgctcagttcggacatacctcaattgttgcttatctcatagcaaaaggacaggatgtagatatgatggatcagaatggaatgacgcctttaatgtgggcagcatatagaacacatagtgtggatccaactagattgcttttaacattcaatgtttcagttaaccttggtgacaagtatcacaaaaacactgctctgcattgggcagtgctagcagggaataccacagtcattagccttcttctggaagctggagctaatgttgatgcccagaatatcaagggcgaatcagcgcttgatttggcaaaacagagaaaaaatgtgtggatgatcaaccacttacaagaggcaaggcaagcaaaaggatatgacaatccgtccttccttagaaagctgaaagctgataaggaatttcggcagaaagtaatgttaggaactcctttcctagttatttggctggttgggtttatagcagacctaaatattgattcttggctcattaaagggctaatgtatggtggtgtttgggctacagtacagtttctttcaaaatcctttttcgatcattcaatgcatagtgcattgccccttgggatatatttggcaaccaaattctggatgtatgtgacgtggttcttctggttttggaatgatctcaactttttatttatccatcttccattccttgccaatagtgttgcacttttctacaattttggaaaatcttggaaatcagatccagggattattaaagcaacagaagagcaaaagaaaaagacaatagttgaacttgcagagacaggaagtctggacctcagtatattctgcagtacctgtttgatacgaaaaccggtgaggtccaaacattgtggtgtgtgcaaccgctgtatagcaaaatttgatcatcattgcccatgggtgggtaactgtgtaggtgcaggcaaccatagatattttatgggctacctattcttcttgctttttatgatctgctggatgatttatggttgtatatcttactggggactccactgtgagaccacttacaccaaggatggattttggacatacattactcagattgccacgtgttcaccttggatgttttggatgttcctgaacagtgttttccacttcatgtgggtggctgtattactcatgtgtcagatgtaccagatatcatgtttaggtattactacaaatgaaagaatgaatgccaggagatacaagcactttaaagtcacaacaacgtctattgaaagcccattcaaccatggatgtgtaagaaatattatagacttctttgaatttcgatgctgtggcctctttcgtcctgttatcgtggactggaccaggcagtatacaatagaatatgaccaaatatcaggatctgggtaccagctggtgtag

SEQ ID NO: 591 - DNA, 1167 bp, Homo sapiens;
atgaaggactgcgagtaccagcagatcagccccggggccgccccgctgcccgcctccccgggggcgcgccgtcccggccccgccgcgtccccgactccgggccccgggcccgcgccgcccgccgcccccgccccgccgcgctggagcagcagcggcagcggcagcggcagcgggagcgggagcctcggccgccgcccacggcgcaagtgggaggtgttcccgggtcgcaatcgcttctactgcggcggccgcctcatgctggccggccacggcggcgtcttcgcgctcacgctgctgctcatcctcaccaccaccggcctcttcttcgtctttgactgtccctacctggctcgcaagctgacccttgccatccccatcatcgctgccatcctcttcttcttcgtcatgagctgcctgctgcagacaagcttcaccgaccctgggatcctgccccgggccactgtctgtgaagcagccgccctggagaaacagatcgacaacacaggcagttctacataccggccaccccctcggacccgggaggtgctgatcaacgggcagatggtgaagctgaagtactgcttcacctgcaagatgttccggccaccccgaacctcacactgcagtgtctgcgacaactgtgtggaacgatttgaccatcactgcccctgggtgggcaactgtgtggggagacggaactatcgcttcttctacgcgtttattctctccctctcattcctgacggccttcatcttcgcctgtgtggtcacccacctgacgttgcgcgctcagggaagcaacttcctctccactctgaaggagacaccagcaagcgtgctggagttggtgatctgcttcttctccatctggtccattctgggcctctcagggtttcacacgtacctcgtcgcctccaacctgactactaatgaagacatcaaaggctcgtggtccagcaagaggggcggtgaggcctctgtcaacccctacagccataaaagtattatcaccaactgctgtgctgtgctctgtggccccctacctcccagcctaattgaccggaggggatttgtgcagtccgacaccgtgttgccctcacccatcagaagcgatgagccagcctgcagagccaagcctgatgccagcatggtaggaggccacccctga

SEQ ID NO: 592 - DNA, 642 bp, Homo sapiens;
atggctcaggagactaaccagaccccggggcccatgctgtgtagcacaggatgtggcttttatggaaatcctaggacaaatggaatgtgttcagtttgctacaaagaacatcttcagaggcagcaaaatagtggcagaatgagcccaatgggaacagctagtggttccaacagtcctacctcagattctgcatctgtacagagagcagacactagcttaaacaactgtgaaggtgctgctggcagcacatctgaaaaatcaagaaatgtgcctgtggctgccttgcctgtaactcagcaaatgacagaaatgagcatttcaagagaggacaaaataactaccccgaaaacagaggtgtcagagccagttgtcactcagcccagtccatcagtttctcagcccagtacttctcagagtgaagaaaaagctcctgaattgcccaaaccaaagaaaaacagatgtttcatgtgcagaaagaaagttggtcttacagggtttgactgccgatgtggaaatttgttttgtggacttcaccgttactctgacaagcacaactgtccgtatgattacaaagcagaagctgcagcaaaaatcagaaaagagaatccagttgttgtggctgaaaaaattcagagaatataa

SEQ ID NO: 593 - DNA, 5970 bp, Homo sapiens;
atggcgaccgcagatactccggccccggcctccagtggcctctcgccgaaggaagaaggggagcttgaagatggggaaatcagtgacgacgataataacagccagatacggagtcggagcagcagcagcagcagcggcggcgggctgttaccctatccgcggcgaaggcctcctcactcggcccggggcggtggatctggcggaggcggtggctcttcctcgtcatcgtcctcttctcagcagcagctgaggaatttctcacgctcgcggcacgcgtctgagcggggccacctcaggggacccagcagctaccgacccaaagaaccgttccggtctcatccgccttctgtacggatgccttcgagctcactgtccgaaagcagtccccggccgtctttctgggagcggagccacctcgccttggaccgtttccgctttcgaggcaggccttaccggggtgggagtcgctggagtcgggggcgaggagtgggtgagcgaggaggcaagccggggtgcagacctcctctgggaggaggagcaggatccgggttcagcagcagtcagagctggcgagagccctctccacctcggaagagctccaaaagttttggaaggtctccatcaagaaaacaaaattattcatcaaaaaatgaaaactgtgtggaagaaacttttgaagatttgcttttaaagtataaacaaatacagttggaactagaatgcatcaataaggatgaaaaactagcattgagtagcaaagaagagaatgtgcaggaagatcctaaaacattgaacttcgaggaccaaactagcactgataatgtcagtattacaaaggattcaagtaaagaagtagctcctgaggagaaaacacaagtcaaaacttttcaggcatttgaattaaaaccactcaggcaaaaattgactttaccaggagataagaaccgtttgaaaaaagttaaagatggagcaaaaccactttccctgaaatccgacactactgattctagtcaaggattacaagataaagaacaaaatttaacaagaagaattagtacctcagatattctgtctgaaaagaaacttggtgaagatgaagaggaactatctgaattacagcttcgccttttggctcttcagtcagccagtaaaaaatggcaacaaaaagaacagcaggtgatgaaagaaagcaaagaaaagttgactaagacgaaaactgtacagcaaaaagttaaaacaagtacaaaaacacattcggccaaaaaagttagcactacagctaaacaagcattgaggaagcagcaaacaaaggcatggaagaaactacaacaacaaaaagagcaggaaagacagaaagaagaggatcagcggaaacaagctgaagaagaagagagaaggaaaagagaggaagaaatcagaaaaattcgagatctctcaaatcaggaagaacagtacaatcgattcatgaaattggttggtggcaagaggagatcaagaagtaaatcttcagatcctgacctgaggcgatccttagataagcaacctactgatagtggaggaggcatttatcagtatgataactatgaagaagttgctatggatacagatagtgaaaccagttctccagctccttcaccagtgcaaccgccatttttctctgaatgttcattggggtatttttctccagcaccatctctttctttgcctccaccacctcaggtttcttctctgccacctttgagccagccttatgtggaaggcttgtgtgtttctcttgaacctctacctcctctaccaccattaccacctctcccacctgaagatccagaacagcctccaaaaccaccttttgcagatgaggaagaggaggaagaaatgctgcttcgagaagaactacttaaatctctagcaaataaaagagcttttaagccagaggaaacatccagtaatagtgacccaccttcacctccagttctgaacaattcacatcctgtgccaagaagcaatctatcaatagtcagtattaacacagtgtctcagcctaggatacagaatccaaagtttcacagaggaccccgtcttccacgaactgtgatctcgcttccaaagcataaatcagtggttgtaacactaaatgattcagatgatagtgaatctgatggagaggcttccaagtcaacaaatagtgtttttggtggattagagtccatgattaaagaagcaagacgaactgctgagcaagcttcaaaaccgaaagtacctccaaaatctgaaaaagaaaatgatcctctgcgaacaccggaggctttgcctgaagaaaagaagattgaatatagattgttaaaggaagagattgccaaccgtgagaaacagcgtttgattaaatcagatcagctgaagacaagttcatcatccccagcaaactctgatgtggaaattgatggtattggcaggatagcaatggttactaagcaggttacagatgcagaatcaaaactgaaaaaacataggattctcttgatgaaagatgaatctgttttaaagaatttagtgcaacaagaagctaagaagaaagaatctgttagaaatgctgaagcaaagattacaaaacttacagaacagcttcaagcaactgaaaaaattcttaatgttaacagaatgtttttgaagaagcttcaggaacaaattcacagagttcaacagcgtgttacaattaagaaagctttgactctaaaatatggagaagagcttgctcgggcaaaggcagtggccagtaaagaaataggaaaacgtaaactggaacaagatcgctttgggccaaacaaaatgatgagactggacagttctccagtatcaagtccaagaaagcattcagcagaactaattgctatggagaaaagacggttacaaaagctagaatatgaatatgccctgaaaattcaaaaattaaaagaagcccgtgcccttaaagcaaaggaacaacaaaatatctctccagttgtggaagaggaacccgaattttctttacctcaaccctcacttcatgatctgacacaagataaattaaccctggacactgaagaaaatgatgttgatgatgaaattttgtctggttcaagcagagagcgaagaagatcttttttagaatccaattattttactaaacctaaccttaagcacactgatactgctaacaaagaatgcataaacaaacttaataaaaatactgtagaaaaaccagaactttttctagggttaaaaattggtgaattgcaaaaattgtattcaaaagctgacagcctaaaacagctgattttaaaaaccaccacaggcattacagagaaggttttgcatggtcaggagatttctgtagatgtggattttgtcacagcacaaagtaaaacaatggaagtgaagccatgtccttttagaccctaccatagtcctcttctagtttttaagtcctacagatttagtccatattatcgaaccaaggaaaaacttcccctgagctcagtatcatacagtaatatgattgaaccggatcagtgtttctgccgttttgatttaacaggaacatgtaatgatgatgattgtcaatggcagcatatacaagactatacacttagccgaaaacagttattccaggacattctgtcatataatctgtctttgattggttgtgcagagacaagtactaatgaagaaattactgcttcagcagaaaaatatgttgagaaactttttggagtaaacaaagatcgaatgtcaatggaccagatggctgttctccttgttagcaatatcaatgaaagtaaaggtcatactcctccatttacaacctacaaagataaaagaaagtggaagccaaagttttggagaaaacctatttcagataatagcttcagtagtgatgaggaacagtctacaggaccaattaagtatgctttccagccagagaaccaaataaatgttccagctctggatacagttgtcactccagatgatgtcagatactttacaaatgagactgatgacatcgctaatttagaagcaagtgtgcttgaaaatccttctcatgtacaactttggctcaagcttgcgtacaagtacttgaatcaaaatgagggggagtgctcagaatccttggattctgctttaaatgttctggcgcgagcattggaaaataacaaagacaatccagaaatttggtgccattacctcagattgttctcaaaaagaggaaccaaggacgaggtgcaggaaatgtgtgaaacagctgttgaatatgctccagattatcaaagcttttggacttttctacacctagaaagtacctttgaagaaaaggattacgtatgtgagagaatgttggagtttctgatgggagcagccaagcaggaaacatccaatattttgtcctttcagcttttagaggctcttttgtttagagttcagctgcacatatttactggaagatgccaaagtgcactggcaattttacagaatgcattgaaatctgctaatgatggaatagtagctgaataccttaaaaccagtgatcgatgtttggcatggttggcctacatacatcttattgaattcaacattctcccttcaaaattttatgatccatctaatgataatccttcaagaattgttaacactgaatcatttgtaatgccatggcaagctgttcaagatgtaaagactaatcctgacatgttgttagcagtttttgaagatgcagtgaaagcttgcacagatgagagccttgctgttgaggaaagaatagaggcctgccttccactttacacaaacatgattgctctgcaccaactcctggagaggtatgaggctgcaatggagctttgtaaatctttattggaatcatgtcctattaactgccagttgctggaagctcttgttgcattatatttgcaaacaaatcagcatgacaaagccagagcagtgtggcttactgcatttgaaaaaaatcctcagaatgcagaggttttttatcatatgtgcaaattcttcatcttacagaatcgaggcgataatcttcttccatttttgcggaaatttattgcatccttctttaaaccggggtttgagaagtataataacttggatctgtttcggtatctcttaaatattccaggaccaattgacattccatctcgtttatgtaaagggaattttgatgatgatatgtttaaccaccaagttccttatttgtggctgatttactgcctttgtcatcctcttcaatcaagtattaaagaaacagtggaggcatatgaggcagcattaggggtggctatgagatgtgatatagtacagaagatatggatggattatcttgtctttgcaaataatagagctgctggatccagaaacaaagttcaagaattcaaattttttactgatttagtgaatagatgtttggttacagtccctgcccgataccccattccttttagcagtgctgattactggtccaactatgaatttcataatagggttattttcttttatttgagctgtgttccaaagacccagcattccaaaaccttggaacggttttgttcagttatgccagctaattctggacttgcattgaggttacttcaacatgaatgggaagaaagcaatgttcagattctgaaacttcaagccaagatgtttacatataatatcccaacatgcctggccacctggaaaatagccattgctgctgagattgttctaaagggacaaagagaggtccaccgtttatatcagagagccttacagaagttacctctttgtgcatcactgtggaaagatcaactcttgtttgaagcatcagaaggaggtaaaactgataacctgagaaaactagtttccaagtgccaagagattggagtcagcctaaatgagctcttaaatttaaacagtaacaaaacagaaagcaagaatcactga

SEQ ID NO: 594 - DNA, 4620 bp, Homo sapiens;
atggacagttattttaaagcagctgtcagtgacttggacaaactccttgatgattttgaacagaacccagatgaacaagattatctccaagatgtacaaaatgcatatgattctaaccactgctcagtttcttcagagttggcttcctcacagcgaacttcattgctcccaaaagaccaagagtgcgttaatagttgtgcctcatcagaaacaagctatggaacaaatgagagttccctgaatgaaaaaacactcaagggacttacttctatacaaaatgaaaaaaatgtaacaggacttgatcttctttcttctgtggatggtggtacttcagatgaaatccagccgttatatatgggacgatgtagtaaacctatctgtgatctgataagtgacatgggtaacttagttcatgcaaccaatagtgaagaagatattaaaaaattattgccagatgattttaagtctaatgcagattccttgattggattggatttatcttcagtgtcagatactccctgtgtttcttcaacagaccatgatagtgatactgtcagagaacaacagaatgatatcagttctgaattacaaaatagagaaatcggaggaatcaaagaattgggtataaaagtagatacaacactttcagattcctataattacagtggaacagaaaatttaaaagataaaaagatctttaatcagttagaatcaattgttgattttaacatgtcatctgctttgactcgacaaagttccaaaatgtttcatgccaaagacaagctacaacacaagagccagccatgtggattactaaaagatgttggcttagtaaaagaggaagtagatgtggcagtcataactgccgcagaatgtttaaaagaagagggcaagacaagtgctttgacctgcagccttccgaaaaatgaagatttatgcttaaatgattcaaattcaagagatgaaaatttcaaattacctgacttttcctttcaggaagataagactgttataaaacaatctgcacaagaagactcaaaaagtttagaccttaaggataatgatgtaatccaagattcctcttcagctttacatgtttccagtaaagatgtgccgtcctcattgtcctgtcttcctgcgtctgggtctatgtgtggatcattaattgaaagtaaagcacggggtgattttttacctcagcatgaacataaagataatatacaagatgcagtgactatacatgaagaaatacagaacagtgttgttctaggtggggaaccattcaaagagaatgatcttttgaaacaggaaaaatgtaaaagcatactccttcagtcattaattgaagggatggaagacagaaagatagatcctgaccagacagtaatcagagctgagtctttggatggtggtgacaccagttctacagttgtagaatctcaagaggggctttctggcactcatgtcccagagtcttctgattgttgtgaaggttttattaatactttttcaagcaatgatatggatgggcaagacttagattactttaatattgatgaaggcgcaaaaagtggcccactaattagtgatgctgaacttgatgcctttctgacagaacagtatcttcagaccactaacataaagtcttttgaagaaaatgtaaatgactctaaatcgcaaatgaatcagatagatatgaaaggcttagatgatggaaacatcaataatatatatttcaatgcagaagcaggagctattggggaaagtcatggtattaatataatttgtgaaatagttgataaacaaaatacaatagaaaatggcctttctttaggagaaaaaagcactattccagttcaacaagggttacctaccagtaagtctgagattacaaatcaattatcggtctctgatattaacagtcaatctgttggaggggccagacctaagcaattgtttagccttccatcaagaacaaggagttcaaaggacctgaataagccagatgttccagatacaatagaaagtgaacccagcacagcagataccgttgttccaatcacttgtgctatagattctacagctgatccacaggttagcttcaactctaattacattgatatagaaagtaattctgaaggtggatctagtttcgtaactgcaaatgaagattctgtacctgaaaacacttgcaaagaaggcttggttttgggccagaaacagcctacttgggttcctgattcagaagctccaaactgtatgaactgccaagtcaaatttacttttaccaaacggcgacaccattgccgagcatgtgggaaagtattttgtggtgtctgttgtaataggaagtgtaaactgcaatatctagaaaaggaagcaagagtatgtgtagtctgctatgaaactattagtaaagctcaggcatttgaaaggatgatgagtccaactggttctaatcttaagtctaatcattctgatgaatgtactactgtccagcctcctcaggagaaccaaacatccagtataccttcaccagcaactttgccagtctcagcacttaaacaaccaggtgttgaaggactatgttccaaagaacagaagagagtatggtttgcagatggtatattgcccaatggtgaagttgcagatacaacaaaattatcatctggaagtaaaagatgttctgaagactttagtcctctctcacctgatgtgcctatgacagtaaacacagtggatcattcccattctactacagtggaaaagccaaacaatgagacaggagatattacaagaaatgagataattcagagtcctatttctcaggttccatcagtggaaaaattgtctatgaacacaggaaatgaggggttacctacttctggttcatttacactagatgatgatgtttttgcagaaactgaagaaccatctagtcctactggtgtcttagttaacagcaatttacctattgctagtatttcagattataggttactgtgtgatattaacaagtatgtctgcaataagattagtcttctacctaatgatgaggacagtttgcccccacttctggttgcatctggagaaaagggatcagtgcctgtagtagaagaacatccatctcatgagcagatcattttgcttcttgaaggtgaaagctttcatcctgttacatttgtcctaaatgctaatctactcgtgaatgtcaaattcatattttattcctcagacaaatattggtacttttcaaccaatggattgcatggcttgggacaggcagaaattattattctattgttatgtttgccaaatgaagatactattcctaaggacatcttcagactatttatcaccatatataaggatgctctaaaaggaaaatacatagaaaacttggacaatattacctttactgagagttttctcagtagcaaggatcacggaggattcctgtttattacacctacttttcagaaacttgatgatctctcattaccaagtaatccttttctttgtggaattcttatccagaagcttgagattccctgggcaaaggtttttcctatgcgtttaatgttgagattgggtgcagaatataaagcatatcctgctcctctaacaagcatcagaggccgaaaacctctttttggagaaataggacacactattatgaacttacttgttgaccttcgaaattaccagtataccttgcataatatagatcaactgttgattcatatggaaatgggaaaaagctgcataaaaataccacggaaaaagtacagtgatgtaatgaaagtactaaattcttccaatgagcatgtcattagcattggagcaagtttcagtacagaagcagattctcatctagtctgtatacagaatgatggaatttatgaaacacaggccaacagtgccactggccatcctagaaaagtgacaggtgcaagttttgtggtattcaatggagctctaaaaacatcttcaggatttcttgctaagtccagcatagttgaagatggcttaatggtacaaataactccagagaccatgaatggcttgcggctagctttacgagaacagaaagactttaaaattacatgtgggaaagttgatgcagtagacctgagagaatacgtggatatctgctgggtagatgctgaagaaaaaggaaacaaaggagttatcagttcagtggatggaatatcattacaaggatttccaagtgaaaaaataaaactggaagcagattttgaaaccgatgagaagattgtaaaatgtaccgaggtgttctactttctaaaggaccaggatttatctattttatcaacttcttatcagtttgcaaaagaaatagccatggcttgtagtgctgcgctgtgccctcacctgaaaactctaaaaagtaatgggatgaataaaattggactcagagtttccattgacactgatatggttgaatttcaggcaggatctgaaggccaacttctgcctcagcattatctaaatgatcttgatagtgctctgatacctgtgatccatggtgggacctccaactctagtttaccattagaaatagaattagtgtttttcattatagaacatcttttttag

SEQ ID NO: 595 - DNA, 3204 bp, Homo sapiens;
atgaattctatggacaggcacatccagcagaccaatgaccgactgcagtgcatcaagcagcacttacagaatcctgccaacttccacaatgccgccacggagctgctggactggtgcggagacccacgggccttccagcggcccttcgagcagagcctgatgggctgtttgacggtggtcagtcgggtggcagcccagcaaggctttgacctggacctcggctacagactgctggctgtgtgtgctgcaaaccgagacaagttcaccccgaagtctgccgccttgttgtcctcctggtgcgaagagctcggccgcctgctgctgctccgacatcagaagagccgccagagcgatccccctgggaaactccccatgcagccccctctcagctccatgagctccatgaaacccactctgtcgcacagtgatgggtcgttcccctatgactctgtcccttggcagcagaacaccaaccagcctcccggctccctttccgtggtcaccacggtttggggagtaaccaacacatcccagagccaggtccttgggaaccctatggccaatgccaacaaccccatgaatccaggcggcaaccccatggcgtcgggcatgaccaccagcaacccaggcctcaactccccacagtttgcggggcagcagcagcagttctcagccaaggctggccccgctcagccctacatccagcagagcatgtatggccggcccaactaccccggcagcgggggctttggggccagttaccctgggggtcctaacgcccccgcaggcatgggcatccctccgcacaccaggccgcctgctgacttcactcagcccgcggcagccgctgcagcagcggcagtggcagcagcagcagccacagctacagccacagccacggccactgtggcagccctgcaggagacacagaacaaggatataaaccagtatggaccgatgggtcccacccaggcgtataacagccaattcatgaaccagcccgggccgcgggggcctgcctccatggggggcagcatgaaccccgcgagcatggcggctggcatgacgccctcggggatgagcggccctcccatgggcatgaaccagccccggccgcccggcatcagcccctttggcacacacgggcagcggatgccccagcagacctacccgggcccccggccccagtcccttcctattcagaacataaagaggccataccctggagagcccaactatggaaaccagcaatatggaccaaacagccagttccccacccagccaggccagtacccagcccccaaccccccgaggccactcacctcccccaactacccaggacagaggatgcccagccagccgagctccgggcagtacccgccccccacggtcaacatggggcagtattacaagccagaacagtttaatggacaaaataacacgttctcgggaagcagctacagtaactacagccaagggaatgtcaacaggcctcccaggccggttcctgtggcaaattacccccactcacctgttccagggaaccccacaccccccatgacccctgggagcagcatccctccatacctgtcccccagccaagacgtcaaaccacccttcccgcctgacatcaagccaaatatgagcgctctgccaccacccccagccaaccacaatgacgagctgcggctcacattccctgtgcgggatggcgtggtgctggagcccttccgcctggagcacaacctggcggtcagcaaccatgtgttccacctgcggcccacggtccaccagacgctgatgtggaggtctgacctggagctgcagttcaagtgctaccaccacgaggaccggcagatgaacaccaactggcccgcctcggtgcaggtcagcgtgaacgccacgcccctcaccattgagcgcggcgacaacaagacctcccacaagcccctgcacctgaagcacgtgtgccagccgggccgcaacaccatccagatcaccgtcacggcctgctgctgctcccacctcttcgtgctgcagctggtacaccggccctccgtccgctctgtgctgcaaggactcctcaagaagcgcctcctgcccgcagagcactgtatcacgaaaatcaagcggaatttcagcagcgtggctgcctcctcgggcaacacgaccctcaacggggaggatggggtggagcagacggccatcaaggtgtctctgaagtgccccatcacattccggcgcatccagctgcctgctcgaggacacgattgcaagcatgtgcagtgctttgatctggagtcatacctgcagctgaattgcgagagagggacctggaggtgtcctgtgtgcaataaaaccgctctgctggagggcctggaggtggatcagtacatgtggggaatcctgaatgccatccaacactccgagtttgaagaggtcaccatcgatcccacgtgcagctggcggccggtgcccatcaagtcggacttacacatcaaggacgaccctgatggcatcccctccaagcggttcaagaccatgagtcccagccagatgatcatgcccaatgtcatggagatgatcgcagccctgggccccggcccgtccccctatcccctcccgcctcccccagggggcaccaactccaacgactacagcagccaaggcaacaactaccaaggccatggcaactttgacttcccccacgggaaccctggagggacatccatgaatgacttcatgcacgggcccccccagctctcccaccccccggacatgcccaacaacatggccgccctcgagaaacccctcagccaccccatgcaggaaactatgccacacgctggcagctctgaccagccccacccctccatacaacaaggtttgcacgtaccacaccccagcagccagtcagggcctccattacatcacagtggggctcctcctcctcctccttcccagcctccccggcagccgccacaggccgctcccagcagccatccacacagcgacctgacctttaacccctcctcagccttagagggtcaggccggagcgcagggagcgtccgacatgccggagccttcgctggatctccttcccgaactcacaaatcctgacgagctcctgtcttatctggacccccccgacctgccgagcaatagtaacgatgacctcctgtctctatttgagaacaactga

SEQ ID NO: 596 - DNA, 1917 bp, Homo sapiens;
atgttgttagcccaaataaatcgagattctcagggaatgacagagtttcctggaggagggatggaggcgcaacatgttacgctgtgcttgacagaggcagtcaccgtggcagatggtgacaacttagaaaatatggaaggcgtaagcttgcaagcagtaacacttgcagatggttctactgcttacatacaacacaattctaaagatgcaaaactcatagatggccaggtcattcagttggaagatggttctgcggcctatgttcaacatgtacccatacctaaaagtacaggggacagtttgcgtctagaggatggtcaagcagtacagttagaagatggtaccacagcatttattcaccacacctccaaagatagttatgaccagagtgcattacaggcggttcagctggaagatggtaccacagcttatatccaccatgcagtgcaagtcccgcagtctgacaccatcttggcaattcaggctgatgggacagtggcaggtctgcacactggggatgctacaattgaccctgacaccatcagtgctttggaacagtatgcagcaaaggtgtccattgatggaagtgaaagtgtagcaggtactggaatgattggagaaaatgagcaagagaaaaaaatgcagattgttttacaaggacatgctacaagagtaactgctaaatctcaacagagtggagagaaggcatttcgatgtgaatatgatggatgtggaaaattatatacaacagctcatcatctcaaggtccatgagaggtcacacacaggagatcggccttatcagtgtgagcatgcaggctgtgggaaggcatttgcaacaggttatggattaaaaagtcacgtcagaactcatacaggagaaaagccatatcggtgttcggaagataattgtactaaatctttcaaaacttcaggagatctacagaaacacatcagaactcatacaggagaaaggccctttaagtgtcccttcgaaggctgcggtcggtcctttacaacatcaaatatcagaaaagtgcacgttaggacacacacaggagaaagaccttattactgcacagagccaggatgtgggagggcatttgccagtgcaacaaattataaaaaccatgtgaggatacacacaggagaaaagccatatgtttgtacagttcctgggtgtgacaaaaggtttacagaatattccagtttgtacaaacatcatgttgtccacactcattccaaaccttacaactgtaaccactgtgggaagacatacaagcagatctccacgctggccatgcacaaacggacagcccacaacgacactgagcccatcgaggaggagcaggaagccttctttgagccgcccccaggtcaaggtgaagatgttcttaaagggtcccagattacgtatgttacaggtgtagaaggggacgacgttgtttctacacaagtagccacagtaacccaatctggactgagtcaacaagttacactcatatcccaggatgggactcagcatgtcaacatatctcaagctgacatgcaggccattggcaacaccatcacaatggtaacgcaggatggcacgcccatcacagtccccgcccatgatgcagtcatctcctcagcaggaacgcactctgttgctatggttactgctgagggtacagaaggggaacaggttgcaattgtagctcaagacttggcagcattccatactgcctcatcagaaatggggcaccagcagcatagccatcacttagtaaccacagaaaccagacctctgaccttagtagcaacatccaatggcacccagattgcagttcagcttggagaacagccatctctggaagaagccatcagaatagcgtctagaatccaacaaggagaaacgccagggttggatgattaa

SEQ ID NO: 597 - DNA, 2385 bp, Homo sapiens;
atgaacattgacgacaaactggaaggattgtttcttaaatgtggcggcatagacgaaatgcagtcttccaggacaatggttgtaatgggtggagtgtctggccagtctactgtgtctggagagctacaggattcagtacttcaagatcgaagtatgcctcaccaggagatccttgctgcagatgaagtgttacaagaaagtgaaatgagacaacaggatatgatatcacatgatgaactcatggtccatgaggagacagtgaaaaatgatgaagagcagatggaaacacatgaaagacttcctcaaggactacagtatgcacttaatgtccctataagcgtaaagcaggaaattacttttactgatgtatctgagcaactgatgagagacaaaaaacaaatcagagagccagtagacttacagaaaaagaagaagcggaaacaacgttctcccgcaaaaatccttacaataaatgaggatggatcacttggtttgaaaacccctaaatctcacgtttgtgagcactgcaatgctgcctttagaacgaactatcacttacagagacatgtcttcattcatacaggtgaaaaaccatttcaatgtagtcaatgtgacatgcgtttcatacagaagtacctgcttcagagacatgagaagattcatactggtgaaaaaccatttcgctgtgatgaatgtggtatgagattcatacaaaaatatcatatggaaaggcataagagaactcatagtggagaaaaaccttaccagtgtgaatactgtttacagtatttttccagaacagatcgtgtattgaaacataaacgtatgtgccatgaaaatcatgacaaaaaactaaatagatgtgccatcaaaggtggccttctgacatctgaggaagattctggcttttctacatcaccaaaagacaactcactgccaaaaaagaaaaggcagaaaacggagaaaaaatcatctggaatggacaaagagagtgctttggacaaatctgacctgaaaaaagacaaaaatgattacttgcctctttattcttcaagtactaaagtaaaagatgagtatatggttgcagaatatgctgttgaaatgccacattcgtcagttgggggctcgcatttagaagatgcgtcaggagaaatacacccacctaagttagttctcaaaaaaattaatagtaagagaagtctgaaacagccactggagcaaaatcaaacaatttcacctttatccacatatgaagagagcaaagtttcaaagtatgcttttgaacttgtggataaacaggctttactggactcagaaggcaatgctgacattgatcaggttgataatttgcaggaggggcccagtaaacctgtgcatagtagtactaattatgatgatgccatgcagtttttgaagaagaagcggtatcttcaagcagcaagtaacaacagcagggaatatgcgctgaatgtgggtaccatagcttctcagccttctgtaacacaagcagctgtggcaagtgtcattgatgaaagtaccacggcatccatattagagtcacaggcactgaatgtggagattaagagtaatcatgacaaaaatgttattccagatgaggtactgcagactctgttggatcattattcccacaaagctaatggacagcatgagatatccttcagtgttgcagatactgaagtgacttctagcatatcaataaattcttcagaagtaccagaggtcaccccgtcagagaatgttggatcaagctcccaagcatcctcatcagataaagccaacatgttgcaggaatactccaagtttctgcagcaggctttggacagaactagccaaaatgatgcctatttgaatagcccgagccttaactttgtgactgataaccagaccctcccaaatcagccagcattctcttccatagacaagcaggtctatgccaccatgcccatcaatagctttcgatcaggaatgaattctccactaagaacaactccagataagtcccactttggactaatagttggtgattcacagcactcatttcccttttcaggtgatgagacaaaccatgcttctgccacatcaacacaggactttctggatcaagtgacttctcagaagaaagctgaggcccagcctgtccaccaagcttaccaaatgagctcctttgaacagcccttccgtgctccctatcatggatcaagagctggaatagctactcaatttagcactgccaatggacaggtgaaccttcggggaccagggacaagtgctgaattttcagaatttcccttggtgaatgtaaatgataatagagctgggatgacatcttcacctgatgccacaactggccagacttttggctaa

SEQ ID NO: 598 - DNA, 1647 bp, Homo sapiens;
atgaacattgaggttgttgaggtcctcacactgaaccaggaggtggctggtccccggaatgcccagatccaggccctatatgctgaagatggaagcctgagtgcagatgcccccagtgagcaggtccaacagcagggcaagcatccaggtgaccctgaggccgcgcgccagaggttccggcagttccgttataaggacatgacaggtccccgggaggccctggaccagctccgagagctgtgtcaccagtggctacagcctaaggcacgctccaaggagcagatcctggagctgctggtgctggagcagttcctaggtgcactgcctgtgaagctccggacatgggtggaatcgcagcacccagagaactgccaagaggtggtggccctggtagagggtgtgacctggatgtctgaggaggaagtacttcctgcaggacaacctgccgagggcaccacctgctgcctcgaggtcactgcccagcaggaggagaagcaggaggatgcagccatctgcccagtgacagtgctccctgaggagccagtgaccttccaggatgtggctgtggacttcagccgggaggagtgggggctgctgggcccgacacagaggaccgagtaccgcgatgtgatgctggagacctttgggcacctggtctctgtggggtgggagactacactggaaaataaagagttagctccaaattctgacattcctgaggaagaaccagcccccagcctgaaagtacaagaatcctcaagggattgtgccttgtcctctacattagaagataccttgcagggtggggtccaggaagtccaagacacagtgttgaagcagatggagtctgctcaggaaaaagaccttcctcagaagaagcactttgacaaccgtgagtcccaggcaaacagtggtgctcttgacacaaaccaagtttcgctccagaaaattgacaaccctgagtcccaggcaaacagtggcgctcttgacacaaaccaagttttgctccacaaaattcctcctagaaaacgattgcgcaaacgtgactcacaagttaaaagtatgaaacataattcacgtgtaaaaattcatcagaagagctgtgaaaggcaaaaggccaaggaaggcaatggttgtaggaaaaccttcagtcggagtactaaacagattacgtttataagaattcacaaggggagccaagtttgccgatgcagtgaatgtggtaaaatattccggaacccaagatacttttctgtgcataagaaaatccataccggagagaggccctatgtgtgtcaagactgtgggaaaggatttgttcagagctcttccctcacacagcatcagagagttcattctggagagagaccatttgaatgtcaggagtgtgggaggaccttcaatgatcgctcagccatctcccagcacctgaggactcacactggcgctaagccctacaagtgtcaggactgtggaaaagccttccgccagagctcccacctcatcagacatcagaggactcacaccggggagcgcccatatgcatgcaacaaatgtggaaaggccttcacccagagctcacaccttattgggcaccagagaacccacaataggacaaagcgaaagaagaaacagcctacctcatag

SEQ ID NO: 599 - DNA, 8172 bp, Homo sapiens;
atggcggacgaagaggccgagcaggagaggttgagttgcggcgaaggcggctgcgtcgcggagctgcagcgcctgggcgagcggctccaggagctggagctacagctgcgggagagccgggtaccggccgtggaagcggccaccgactactgtcagcagctgtgccagacactcctagaatatgcagagaaatggaaaacttcagaagatcctttacctttattggaggtatacacagtggctatccaaagttatgttaaagcccgaccttatcttacctctgaatgtgaaaatgtagccttggttctggaacgcttggcattaagctgtgttgaacttttactgtgtctgcctgttgagttatcagataaacagtgggaacaatttcagacactggtgcaggtagctcatgaaaagctgatggagaatggcagctgtgaattgcattttttagctactctagctcaagagactggggtgtggaaaaacccggtactgtgcactattctttcccaggaaccattggataaggataaagtgaatgaatttttagcttttgagggtcccatcttgttggatatgagaattaaacatctaatcaaaacaaatcagttaagtcaagcaactgctctagcaaagctgtgttctgaccatccagagattggcataaaaggtagttttaagcaaacttaccttgtctgtctttgtacatcatcaccaaatggaaagttaatcgaagagatttcagaagttgattgcaaagatgcactggaaatgatctgtaacttagaatctgagggtgatgaaaaaagcgctcttgttttatgtactgcgtttttgtcacgtcagctccaacaaggagatatgtactgcgcttgggaacttactctcttttggagtaaattacaacaaagagtagaaccatctatacaagtgtaccttgagaggtgtcgtcaactttctttgttaacgaaaacagtatatcacattttcttcctgattaaagttattaattcagagactgaaggggctggacttgctacctgtatagaactgtgtgtaaaggctcttcgcttggagtctacagaaaatactgaagtgaaaatatctatttgcaagaccatttcatgtttgttgcctgatgatctggaagttaaacgtgcttgtcaactgagtgaatttcttattgagcctacagtagatgcgtattatgctgtggaaatgttgtataatcagccagaccagaaatatgatgaagagaatcttccaataccaaattctttacgctgtgagctgttacttgtattgaaaactcaatggccctttgatccagaattctgggattggaaaaccttgaaacgacaatgtcttgcattaatgggagaagaagcatccattgtgtcttcaatagatgaactaaatgacagtgaagtatatgaaaaagtggtagactaccaagaagagagtaaagaaacttctatgaatgggctttctggtggagttggtgctaattctggccttcttaaagacattggtgatgaaaagcagaagaagagagagataaaacagttaagagagaggggatttatatctgctcggtttaggaattggcaagcctacatgcagtattgtgtgttgtgtgacaaagaattccttggtcacagaatagtacgacatgctcagaaacattacaaagatggaatttatagttgccccatatgtgcaaagaactttaattctaaagaaacttttgtccctcatgtcacactgcatgttaaacaatctagtaaagagagactagcagctatgaaaccattaagaagattgggaaggcctccaaagatcacaactaccaatgaaaatcagaagactaatactgtggctaaacaggagcagcgacctataaaaaagaatagtctctattcaacagattttatagtgtttaatgacaatgatggttcagatgatgagaatgatgacaaagataaatcctatgagccagaagtgattccagtccagaaaccagtacctgttaatgaatttaattgccctgtaactttttgtaaaaagggctttaagtactttaaaaatttaattgctcatgtgaaggggcataaagataatgaagacgccaagcgctttcttgaaatgcagagcaaaaaagttatttgccagtactgtaggcggcattttgtgagtgttactcatctcaatgatcacttacagatgcactgtggcagtaaaccatatatctgtatacagatgaaatgtaaagctggttttaatagttacgccgagcttttaacccaccgaaaggagcatcaagtctttagagcaaaatgtatgtttcctaaatgtggaagaattttttcggaagcttatttactatatgatcatgaagcacaacattataatacgtacacttgtaagttcacaggttgtggtaaagtttatcgttctcagggtgagctggaaaagcatctggatgatcacagtactcctcctgaaaaagtgctgcctcctgaagcccaacttaattcatctggagattccattcagccttctgaagtgaatcagaacacagcagagaatattgagaaagaaagatctatgcttccttcagaaaataacattgaaaacagcttactagcagatagaagtgatgcttgggataaaagcaaagcagaatcagctgtgaccaaacaagaccagatttctgcctctgagctcaggcaagctaatggaccattgtcaaatggtttggaaaaccctgctactactcctctacttcaatccagtgaagtagctgtgtccattaaggtgtctctcaatcaggggattgaggataactttggaaagcaagaaaactcaactgtggaaggcagtggtgaagcactggtcacagacttacatacgccagttgaagatacttgtaatgatttgtgtcatccaggtttccaggagagaaaagaacaagattgctttaatgatgcccatgttactcagaattctttagtaaattcagaaactctcaaaataggtgaccttaccccacaaaacttagaaagacaagtgaacaacttgatgaccttttctgtgcaaaatcaggcagcatttcaaaacaatttaccaacttccaaatttgaatgtggagataatgttaaaacatcatccaatctttataatttacctcttaagacattagaaagtattgcatttgttccaccgcagtccgacctaagtaattcattaggaactccatcagtgcctccaaaagctccagttcagaaattcagctgccaggtcgagggatgtactcgaacctataattcttcacagagtattgggaaacacatgaagacagcacaccctgaccaatatgctgcatttaaaatgcagcgcaaaagtaaaaaaggtcagaaagctaacaacttaaatacaccaaataatggaaagtttgtttattttttgccatcaccggtgaacagctcaaatccattttttacatcacagaccaaagccaatgggaatcctgcttgttcggcccagttgcagcatgtctcgccacccatttttccagctcatttagcaagtgtgtcaactccattgttgtcctcaatggaaagtgtcataaatccaaatataacttctcaggataaaaatgaacaaggtggtatgttatgttcccaaatggaaaatttacctagtactgccttgccagcacaaatggaagatctaaccaaaacagttctgcctttgaatattgacagtggctcagatcctttccttcctttacctgcagaaagtagttcaatgtctctcttcccttcaccagcagatagtgggactaattctgttttttcccaactggaaaataatacaaatcattattcctcacagattgaaggaaacactaattcctcctttctaaaggggggtaatggtgaaaatgcagtttttccttcacaagtgaatgttgcaaataacttcagtagcaccaatgcccaacagtctgcacctgaaaaagttaaaaaagaccgtgggcggggcccaaatgggaaggaaagaaaacctaagcacaacaaaagggctaaatggcctgcaattatcagagatgggaaatttatctgtagcaggtgttacagggcttttactaatcccagatcactgggtgggcacttatccaagcgatcttactgtaaaccactggatggagccgaaattgctcaagaacttctacagagtaatggacagccttctcttcttgccagcatgattctctccacaaatgcagtaaatttgcagcagccacaacaatctaccttcaatccagaagcatgttttaaagatccatcatttctacagcttcttgctgaaaatcgctcgccagcatttttaccaaatacatttcctcgatctggtgtgactaactttaataccagtgtcagtcaagaaggtagtgaaattattaaacaggctttggaaactgctggcattcccagtacatttgagggtgccgaaatgctttctcatgtttcaacaggttgtgtctctgatgcatcacaagtaaatgcaacggtgatgccaaatccaactgtaccacccctgttgcacactgtatgccatccaaacaccttgctgaccaaccagaataggacgtcaaactccaaaacttcctccattgaggaatgtagcagcttgcctgtttttccaacgaatgacttactactgaagactgttgaaaatggtttgtgctctagttcatttcctaattctggtgggccatcacaaaattttaccagtaacagttctcgtgtttctgttataagtggtcctcagaacacaagatccagtcatttaaataaaaagggaaacagtgcttctaagagaagaaagaaagttgctcctccactaattgcacctaacgcttcccaaaacttggtaacaagtgacttaacaacaatgggactcatagcaaagagtgttgaaatcccaactactaaccttcattcaaatgtaattccaacttgtgaacctcagagtttggtggaaaatctaacacagaaattaaataatgttaacaatcagttatttatgactgatgtaaaagagaatttcaaaaccagtcttgagtcccatacagtgttagcccctttaacattaaaaactgaaaatggtgattcccaaatgatggctttgaattcatgcacaacttcaataaattctgatttgcagatttctgaagacaatgttatacaaaactttgaaaagactcttgaaattattaaaactgctatgaattctcaaatacttgaggtaaaaagtggatctcagggtgctggtgaaacttcacaaaatgctcaaataaattataacattcagcttccttcagtaaacactgtgcaaaataacaaattacccgattcttctccgttttcctcctttataagtgtcatgccaacaaaaagtaacattcctcagtctgaagtatcacataaggaggatcaaatacaggaaattttagaaggcttacagaaattaaaattagaaaatgacctatccactccagcatcccaatgtgtactgataaatacatcagtgacactgactcccacgcctgttaaatcaactgcagatatcacagttattcagccagtttctgaaatgataaacattcaatttaatgacaaagttaataaaccctttgtgtgtcaaaaccaaggctgtaactacagtgctatgacaaaggatgcactatttaagcactatggtaaaattcatcaatacactccagaaatgattcttgaaattaagaagaatcaattgaaatttgctccctttaaatgtgtagtacctacatgtacaaaaacatttacaagaaattctaacctccgggcacactgtcagttggtgcatcattttacaactgaagaaatggtaaagttaaaaattaaaaggccttatggaagaaaatctcagagtgaaaatgtgccggcctcacgaagtacacaagtgaaaaaacagctagctatgacagaggaaaataaaaaggaatctcagcctgctttagaattgagagcagagacccaaaatacccacagtaatgtagcagtgatcccagaaaaacaacttgtagaaaaaaaaagtcctgacaaaacagaaagttctttacaagtgattacagttacttcagaacaatgtaatacaaatgcactcacaaacacacaaaccaaaggacggaagattaggaggcataaaaaagaaaaggaggagaaaaaacgaaagaagccagtttcccaatcccttgagtttccaacaagatacagtccttacagaccttatcgatgtgttcaccagggatgctttgctgcctttacgatacagcaaaacttgattctccattaccaggctgtacacaaatcagatctacctgcattttcagcagaggtcgaagaggaaagtgaagctggtaaagaaagtgaagaaactgaaactaaacaaactttgaaagaatttcgatgtcaggtaagtgactgttctcgaattttccaagcaattactggcctaatacaacactacatgaaacttcatgaaatgactcctgaagaaattgaaagtatgactgcttcagtggatgttgggaagtttccatgtgaccagttagagtgtaaatcttcatttactacatatttgaactatgttgttcatctagaggcagaccacgggattggactaagggcaagtaaaacagaagaagatggtgtatacaaatgtgattgtgaaggctgtgaccgtatatatgcaacccggtcgaatctcctccgacacatttttaataagcataatgacaaacataaggctcatttgattcgtccaagaagattaacaccaggccaggaaaatatgtcaagcaaggcaaaccaagaaaaatcaaagtctaaacatcgggggaccaagcacagcagatgtggaaaggaaggaataaaaatgcccaagaccaaacgaaagaaaaaaaataatttagaaaacaagaatgcaaagattgtgcagattgaagaaaataagccttattctctgaaacgtgggaagcatgtatattctataaaggctagaaatgatgccctgtctgagtgtacaagcagatttgtaacccagtatccatgtatgataaagggatgtacttcagttgttacaagtgaaagcaatataattagacattataagtgccataaattatctaaggcatttacatcacaacaccgaaatcttcttattgtattcaaacggtgttgcaactcacaagtaaaggaaacgtctgagcaagaaggtgctaagaatgatgtgaaagattctgacacgtgtgtatcagagagcaatgataattcaagaacaacagctacagtttcacaaaaggaagttgaaaaaaatgaaaaagatgaaatggatgaactaacagaattgtttattacaaaattaataaatgaagatagcacaagtgtagagacccaagctaatacttcttcaaatgtaagtaatgattttcaggaagataacctctgccagtcagaaagacaaaaagcaagtaatttgaagagagttaataaggaaaaaaatgtctcacaaaataaaaaaaggaaagttgaaaaagctgaaccagcatcagcagctgagttaagtagcgtgcgtaaagaagaagaaactgctgttgccattcaaaccattgaggagcatcctgcatcttttgactggagctcttttaagccaatgggatttgaagtatcatttctgaagtttcttgaggagtctgcagtgaagcagaagaaaaatactgacaaagaccatccgaatactggaaacaaaaaaggatcccattcaaattcaagaaaaaatattgataagactgctgtgactagtggaaatcatgtatgtccttgtaaagaaagcgaaacgtttgtacagtttgccaatccatcacagcttcagtgcagtgataatgtaaaaattgttttagacaagaatcttaaagattgcactgagcttgtcttaaagcaacttcaggaaatgaaacctaccgtcagtctgaaaaaacttgaagtacattcaaatgatccagatatgtctgttatgaaagatatcagtataggtaaagccacaggcagaggtcagtactga

SEQ ID NO: 600 - DNA, 2577 bp, Homo sapiens;
atggacctcccggcgctgctccccgccccgactgcgcgcggagggcaacatggcggcggccccggcccgctccgccgagccccagcgccgctcggcgcgagccccgcgcgccgccgcctgctactggtgcggggccctgaagatggcgggcccggggcgcggcccggggaggcctccgggccaagcccgccgcccgccgaggacgacagcgacggcgactctttcttggtgctgctggaagtgccgcacggcggcgctgccgccgaggctgccggatcacaggaggccgagcctggctcccgtgtcaacctggcgagccgccccgagcagggccccagcggcccggccgccccccccggccctggcgtagccccggcgggcgccgtcaccatcagcagccaggacctgctggtgcgtctcgaccgcggcgtcctcgcgctgtctgcgccgcccggccccgcaaccgcgggcgccgccgctccccgccgcgcgccccaggcctccggccccagcacgcccggctaccgctgccccgagccgcagtgcgcgctggccttcgccaagaagcaccagctcaaggtgcacctgctcacgcacggcggcggtcagggccggcggcccttcaagtgcccactggagggctgtggttgggccttcacaacgtcctacaagctcaagcggcacctgcagtcgcacgacaagctgcggcccttcggctgtccagtgggcggctgtggcaagaagttcactacggtctataacctcaaggcgcacatgaagggccacgagcaggagagcctgttcaagtgcgaggtgtgcgccgagcgcttccccacgcacgccaagctcagctcccaccagcgcagccacttcgagcccgagcgcccttacaagtgtgactttcccggctgtgagaagacatttatcacagtgagtgccctgttttcccataaccgagcccacttcagggaacaagagctcttttcctgctcctttcctgggtgcagcaagcagtatgataaagcctgtcggctgaaaattcacctgcggagccatacaggtgaaagaccatttatttgtgactctgacagctgtggctggaccttcaccagcatgtccaaacttctaaggcacagaaggaaacatgacgatgaccggaggtttacctgccctgtcgagggctgtgggaaatcattcaccagagcagagcatctgaaaggccacagcataacccacctaggcacaaagccgttcgagtgtcctgtggaaggatgttgcgcgaggttctccgctcgtagcagtctgtacattcactctaagaaacacgtgcaggatgtgggtgctccgaaaagccgttgcccagtttctacctgcaacagactcttcacctccaagcacagcatgaaggcgcacatggtcagacagcacagccggcgccaagatctcttacctcagctagaagctccgagttctcttactcccagcagtgaactcagcagcccaggccaaagtgagctcactaacatggatcttgctgcactcttctctgacacacctgccaatgctagtggttctgcaggtgggtcggatgaggctctgaactccggaatcctgactattgacgtcacttctgtgagctcctctctgggagggaacctccctgctaataatagctccctagggccgatggaacccctggtcctggtggcccacagtgatattcccccaagcctggacagccctctggttctcgggacagcagccacggttctgcagcagggcagcttcagtgtggatgacgtgcagactgtgagtgcaggagcattaggctgtctggtggctctgcccatgaagaacttgagtgacgacccactggctttgacctccaatagtaacttagcagcacatatcaccacaccgacctcttcgagcaccccccgagaaaatgccagtgtcccggaactgctggctccaatcaaggtggagccggactcgccttctcgcccaggagcagttgggcagcaggaaggaagccatgggctgccccagtccacgttgcccagtccagcagagcagcacggtgcccaggacacagagctcagtgcaggcactggcaacttctatttggaaagtgggggctcagcaagaactgattaccgagccattcaactagccaaggaaaaaaagcagagaggagcggggagcaatgcaggagcctcacagtctactcagagaaaaataaaagaaggcaaaatgagtcctccccatttccatgcaagccagaacagttggttgtgtgggagcctcgtggtgcccagcggaggacggccaggaccagctccagcagctggggtgcagtgcggggcgcagggcgtccaggtccagctggtgcaggatgacccctccggcgaaggtgtcctgccctcggcccgcggcccagccaccttcctccccttcctcactgtggacctgcccgtctacgtcctccaggaggtgctcccctcatctggaggccctgctggaccggaggccacccagttcccaggaagcactatcaacctgcaggatctgcagtga

SEQ ID NO: 601 - DNA, 1719 bp, Homo sapiens;
atggcggccccccgcccgtctcccgcgatctccgtttcggtctcggctccggctttttacgccccgcagaagaagttcggccctgtggtggccccaaagcccaaagtgaatcccttccggcccggggacagcgagcctcccccggcacccggggcccagcgcgcacagatgggccgggtgggcgagattcccccgccgcccccggaagactttcccctgcctccacctccccttgctggggatggcgacgatgcagagggtgctctgggaggtgccttcccgccgccccctcccccgatcgaggaatcatttccccctgcgcctctggaggaggagatcttcccttccccgccgcctcctccggaggaggagggagggcctgaggcccccataccgcccccaccacagcccagggagaaggtgagcagtattgatttggagatcgactctctgtcctcactgctggatgacatgaccaagaatgatcctttcaaagcccgggtgtcatctggatatgtgcccccaccagtggccactccattcagttccaagtccagtaccaagcctgcagccgggggcacagcacccctgcctccttggaagtccccttccagctcccagcctctgccccaggttccggctccggctcagagccagacacagttccatgttcagccccagccccagcccaagcctcaggtccaactccatgtccagtcccagacccagcctgtgtctttggctaacacccagccccgagggcccccagcctcatctccggctccagcccctaagttttctccagtgactcctaagtttactcctgtggcttccaagttcagtcctggagccccaggtggatctgggtcacaaccaaatcaaaaattggggcaccccgaagctctttctgctggcacaggctcccctcaacctcccagcttcacctatgcccagcagagggagaagccccgagtgcaggagaagcagcaccccgtgcccccaccggctcagaaccaaaaccaggtgcgctcccctggggccccagggcccctgactctgaaggaggtggaggagctggagcagctgacccagcagctaatgcaggacatggagcatcctcagaggcagaatgtggctgtcaacgaactctgcggccgatgccatcaacccctggcccgggcgcagccagccgtccgcgctctagggcagctgttccacatcgcctgcttcacctgccaccagtgtgcgcagcagctccagggccagcagttctacagtctggagggggcgccgtactgcgagggctgttacactgacaccctggagaagtgtaacacctgcggggagcccatcactgaccgcatgctgagggccacgggcaaggcctatcacccgcactgcttcacctgtgtggtctgcgcccgccccctggagggcacctccttcatcgtggaccaggccaaccggccccactgtgtccccgactaccacaagcagtacgccccgaggtgctccgtctgctctgagcccatcatgcctgagcctggccgagatgagactgtgcgagtggtcgccctggacaagaacttccacatgaagtgttacaagtgtgaggactgcgggaagcccctgtcgattgaggcagatgacaatggctgcttccccctggacggtcacgtgctctgtcggaagtgccacactgctagagcccagacctga

SEQ ID NO: 602 - protein, 500 aa, Homo sapiens
MASMLLAQRLACSFQHSYRLLVPGSRHISQAAAKVDVEFDYDGPLMKTEVPGPRSQELMKQLNIIQNAEAVHFFCNYEESRGNYLVDVDGNRMLDLYSQISSVPIGYSHPALLKLIQQPQNASMFVNRPALGILPPENFVEKLRQSLLSVAPKGMSQLITMACGSCSNENALKTIFMWYRSKERGQRGFSQEELETCMINQAPGCPDYSILSFMGAFHGRTMGCLATTHSKAIHKIDIPSFDWPIAPFPRLKYPLEEFVKENQQEEARCLEEVEDLIVKYRKKKKTVAGIIVEPIQSEGGDNHASDDFFRKLRDIARKHGCAFLVDEVQTGGGCTGKFWAHEHWGLDDPADVMTFSKKMMTGGFFHKEEFRPNAPYRIFNTWLGDPSKNLLLAEVINIIKREDLLNNAAHAGKALLTGLLDLQARYPQFISRVRGRGTFCSFDTPDDSIRNKLILIARNKGVVLGGCGDKSIRFRPTLVFRDHHAHLFLNIFSDILADFK

SEQ ID NO: 603 - protein, 425 aa, Homo sapiens
MNAMLETPELPAVFDGVKLAAVAAVLYVIVRCLNLKSPTAPPDLYFQDSGLSRFLLKSCPLLTKEYIPPLIWGKSGHIQTALYGKMGRVRSPHPYGHRKFITMSDGATSTFDLFEPLAEHCVGDDITMVICPGIANHSEKQYIRTFVDYAQKNGYRCAVLNHLGALPNIELTSPRMFTYGCTWEFGAMVNYIKKTYPLTQLVVVGFSLGGNIVCKYLGETQANQEKVLCCVSVCQGYSALRAQETFMQWDQCRRFYNFLMADNMKKIILSHRQALFGDHVKKPQSLEDTDLSRLYTATSLMQIDDNVMRKFHGYNSLKEYYEEESCMRYLHRIYVPLMLVNAADDPLVHESLLTIPKSLSEKRENVMFVLPLHGGHLGFFEGSVLFPEPLTWMDKLVVEYANAICQWERNKLQCSDTEQVEADLE

SEQ ID NO: 604 - protein, 508 aa, Homo sapiens
MAELQMLLEEEIPSGKRALIESYQNLTRVADYCENNYIQATDKRKALEETKAYTTQSLASVAYQINALANNVLQLLDIQASQLRRMESSINHISQTVDIHKEKVARREIGILTTNKNTSRTHKIIAPANMERPVRYIRKPIDYTVLDDVGHGVKWLKAKHGNNQPARTGTLSRTNPPTQKPPSPPMSGRGTLGRNTPYKTLEPVKPPTVPNDYMTSPARLGSQHSPGRTASLNQRPRTHSGSSGGSGSRENSGSSSIGIPIAVPTPSPPTIGPENISVPPPSGAPPAPPLAPLLPVSTVIAAPGSAPGSQYGTMTRQISRHNSTTSSTSSGGYRRTPSVTAQFSAQPHVNGGPLYSQNSISIAPPPPPMPQLTPQIPLTGFVARVQENIADSPTPPPPPPPDDIPMFDDSPPPPPPPPVDYEDEEAAVVQYNDPYADGDPAWAPKNYIEKVVAIYDYTKDKDDELSFMEGAIIYVIKKNDDGWYEGVCNRVTGLFPGNYVESIMHYTD

SEQ ID NO: 605 - protein, 778 aa, Homo sapiens
MPAFLGLKCLGKLCSSEKSKVTSSERTSARGSNRKRLIVEDRRVSGTSFTAHRRATITHLLYLCPKDYCPRGRVCNSVDPFVAHPQDPHHPSEKPVIHCHKCGEPCKGEVLRVQTKHFHIKCFTCKVCGCDLAQGGFFIKNGEYLCTLDYQRMYGTRCHGCGEFVEGEVVTALGKTYHPNCFACTICKRPFPPGDRVTFNGRDCLCQLCAQPMSSSPKETTFSSNCAGCGRDIKNGQALLALDKQWHLGCFKCKSCGKVLTGEYISKDGAPYCEKDYQGLFGVKCEACHQFITGKVLEAGDKHYHPSCARCSRCNQMFTEGEEMYLQGSTVWHPDCKQSTKTEEKLRPTRTSSESIYSRPGSSIPGSPGHTIYAKVDNEILDYKDLAAIPKVKAIYDIERPDLITYEPFYTSGYDDKQERQSLGESPRTLSPTPSAEGYQDVRDRMIHRSTSQGSINSPVYSRHSYTPTTSRSPQHFHRPGNEPSSGRNSPLPYRPDSRPLTPTYAQAPKHFHVPDQGINIYRKPPIYKQHAALAAQSKSSEDIIKFSKFPAAQAPDPSETPKIETDHWPGPPSFAVVGPDMKRRSSGREEDDEELLRRRQLQEEQLMKLNSGLGQLILKEEMEKESRERSSLLASRYDSPINSASHIPSSKTASLPGYGRNGLHRPVSTDFAQYNSYGDVSGGVRDYQTLPDGHMPAMRMDRGVSMPNMLEPKIFPYEMLMVTNRGRNKILREVDRTRLERHLAPEVFREIFGMSIQEFDRLPLWRRNDMKKKAKLF

SEQ ID NO: 606 - protein, 424 aa, Homo sapiens
MQRLQVVLGHLRGPADSGWMPQAAPCLSGAPQASAADVVVVHGRRTAICRAGRGGFKDTTPDELLSAVMTAVLKDVNLRPEQLGDICVGNVLQPGAGAIMARIAQFLSDIPETVPLSTVNRQCSSGLQAVASIAGGIRNGSYDIGMACGVESMSLADRGNPGNITSRLMEKEKARDCLIPMGITSENVAERFGISREKQDTFALASQQKAARAQSKGCFQAEIVPVTTTVHDDKGTKRSITVTQDEGIRPSTTMEGLAKLKPAFKKDGSTTAGNSSQVSDGAAAILLARRSKAEELGLPILGVLRSYAVVGVPPDIMGIGPAYAIPVALQKAGLTVSDVDIFEINEAFASQAAYCVEKLRLPPEKVNPLGGAVALGHPLGCTGARQVITLLNELKRRGKRAYGVVSMCIGTGMGAAAVFEYPGN

SEQ ID NO: 607 - protein, 778 aa, Homo sapiens
MKMTVDFEECLKDSPRFRAALEEVEGDVAELELKLDKLVKLCIAMIDTGKAFCVANKQFMNGIRDLAQYSSNDAVVETSLTKFSDSLQEMINFHTILFDQTQRSIKAQLQNFVKEDLRKFKDAKKQFEKVSEEKENALVKNAQVQRNKQHEVEEATNILTATRKCFRHIALDYVLQINVLQSKRRSEILKSMLSFMYAHLAFFHQGYDLFSELGPYMKDLGAQLDRLVVDAAKEKREMEQKHSTIQQKDFSSDDSKLEYNVDAANGIVMEGYLFKRASNAFKTWNRRWFSIQNNQLVYQKKFKDNPTVVVEDLRLCTVKHCEDIERRFCFEVVSPTKSCMLQADSEKLRQAWIKAVQTSIATAYREKGDESEKLDKKSSPSTGSLDSGNESKEKLLKGESALQRVQCIPGNASCCDCGLADPRWASINLGITLCIECSGIHRSLGVHFSKVRSLTLDTWEPELLKLMCELGNDVINRVYEANVEKMGIKKPQPGQRQEKEAYIRAKYVERKFVDKYSISLSPPEQQKKFVSKSSEEKRLSISKFGPGDQVRASAQSSVRSNDSGIQQSSDDGRESLPSTVSANSLYEPEGERQDSSMFLDSKHLNPGLQLYRASYEKNLPKMAEALAHGADVNWANSEENKATPLIQAVLGGSLVTCEFLLQNGANVNQRDVQGRGPLHHATVLGHTGQVCLFLKRGANQHATDEEGKDPLSIAVEAANADIVTLLRLARMNEEMRESEGLYGQPGDETYQDIFRDFSQMASNNPEKLNRFQQDSQKF

SEQ ID NO: 608 - protein, 505 aa, Homo sapiens
MAESAGASSFFPLVVLLLAGSGGSGPRGVQALLCACTSCLQANYTCETDGACMVSIFNLDGMEHHVRTCIPKVELVPAGKPFYCLSSEDLRNTHCCYTDYCNRIDLRVPSGHLKEPEHPSMWGPVELVGIIAGPVFLLFLIIIIVFLVINYHQRVYHNRQRLDMEDPSCEMCLSKDKTLQDLVYDLSTSGSGSGLPLFVQRTVARTIVLQEIIGKGRFGEVWRGRWRGGDVAVKIFSSREERSWFREAEIYQTVMLRHENILGFIAADNKDNGTWTQLWLVSDYHEHGSLFDYLNRYTVTIEGMIKLALSAASGLAHLHMEIVGTQGKPGIAHRDLKSKNILVKKNGMCAIADLGLAVRHDAVTDTIDIAPNQRVGTKRYMAPEVLDETINMKHFDSFKCADIYALGLVYWEIARRCNSGGVHEEYQLPYYDLVPSDPSIEEMRKVVCDQKLRPNIPNWWQSYEALRVMGKMMRECWYANGAARLTALRIKKTLSQLSVQEDVKI

SEQ ID NO: 609 - protein, 147 aa, Homo sapiens
MSQTRDLQGGKAFGLLKAQQEERLDEINKQFLDDPKYSSDEDLPSKLEGFKEKYMEFDLNGNGDIDIMSLKRMLEKLGVPKTHLELKKLIGEVSSGSGETFSYPDFLRMMLGKRSAILKMILMYEEKAREKEKPTGPPAKKAISELP

SEQ ID NO: 610 - protein, 485 aa, Homo sapiens
MELEVRRVRQAFLSGRSRPLRFRLQQLEALRRMVQEREKDILTAIAADLCKSEFNVYSQEVITVLGEIDFMLENLPEWVTAKPVKKNVLTMLDEAYIQPQPLGVVLIIGAWNYPFVLTIQPLIGAIAAGNAVIIKPSELSENTAKILAKLLPQYLDQDLYIVINGGVEETTELLKQRFDHIFYTGNTAVGKIVMEAAAKHLTPVTLELGGKSPCYIDKDCDLDIVCRRITWGKYMNCGQTCIAPDYILCEASLQNQIVWKIKETVKEFYGENIKESPDYERIINLRHFKRILSLLEGQKIAFGGETDEATRYIAPTVLTDVDPKTKVMQEEIFGPILPIVPVKNVDEAINFINEREKPLALYVFSHNHKLIKRMIDETSSGGVTGNDVIMHFTLNSFPFGGVGSSGMGAYHGKHSFDTFSHQRPCLLKSLKREGANKLRYPPNSQSKVDWGKFFLLKRFNKEKLGLLLLTFLGIVAAVLVKAEYY

SEQ ID NO: 611 - protein, 239 aa, Homo sapiens
MEKEKGNDDGIPDQENSLDFSEHFNQLELLETHGHLIPTGTQSLWVGNSDEDEEQDDKNEEWYRLQEKKMEKDPSRLLLWAAEKNRLTTVRRLLSEKATHVNTRDEDEYTPLHRAAYSGHLDIVQELIAQGADVHAVTVDGWTPLHSACKWNNTRVASFLLQHDADINAQTKGLLTPLHLAAGNRDSKDTLELLLMNRYVKPGLKNNLEETAFDIARRTSIYHYLFEIVEGCTNSSPQS

SEQ ID NO: 612 - protein, 575 aa, Homo sapiens
MQSPWKILTVAPLFLLLSLQSSASPANDDQSRPSLSNGHTCVGCVLVVSVIEQLAQVHNSTVQASMERLCSYLPEKLFLKTTCYLVIDKFGSDIIKLLSADMNADVVCHTLEFCKQNTGQPLCHLYPLPKETWKFTLQKARQIVKKSPILKYSRSGSDICSLPVLAKICQKIKLAMEQSVPFKDVDSDKYSVFPTLRGYHWRGRDCNDSDESVYPGRRPNNWDVHQDSNCNGIWGVDPKDGVPYEKKFCEGSQPRGIILLGDSAGAHFHISPEWITASQMSLNSFINLPTALTNELDWPQLSGATGFLDSTVGIKEKSIYLRLWKRNHCNHRDYQNISRNGASSRNLKKFIESLSRNKVLDYPAIVIYAMIGNDVCSGKSDPVPAMTTPEKLYSNVMQTLKHLNSHLPNGSHVILYGLPDGTFLWDNLHNRYHPLGQLNKDMTYAQLYSFLNCLQVSPCHGWMSSNKTLRTLTSERAEQLSNTLKKIAASEKFTNFNLFYMDFAFHEIIQEWQKRGGQPWQLIEPVDGFHPNEVALLLLADHFWKKVQLQWPQILGKENPFNPQIKQVFGDQGGH

SEQ ID NO: 613 - protein, 666 aa, Homo sapiens
MGESSEDIDQMFSTLLGEMDLLTQSLGVDTLPPPDPNPPRAEFNYSVGFKDLNESLNALEDQDLDALMADLVADISEAEQRTIQAQKESLQNQHHSASLQASIFSGAASLGYGTNVAATGISQYEDDLPPPPADPVLDLPLPPPPPEPLSQEEEEAQAKADKIKLALEKLKEAKVKKLVVKVHMNDNSTKSLMVDERQLARDVLDNLFEKTHCDCNVDWCLYEIYPELQIERFFEDHENVVEVLSDWTRDTENKILFLEKEEKYAVFKNPQNFYLDNRGKKESKETNEKMNAKNKESLLEESFCGTSIIVPELEGALYLKEDGKKSWKRRYFLLRASGIYYVPKGKTKTSRDLACFIQFENVNIYYGTQHKMKYKAPTDYCFVLKHPQIQKESQYIKYLCCDDTRTLNQWVMGIRIAKYGKTLYDNYQRAVAKAGLASRWTNLGTVNAAAPAQPSTGPKTGTTQPNGQIPQATHSVSAVLQEAQRHAETSKDKKPALGNHHDPAVPRAPHAPKSSLPPPPPVRRSSDTSGSPATPLKAKGTGGGGLPAPPDDFLPPPPPPPPLDDPELPPPPPDFMEPPPDFVPPPPPSYAGIAGSELPPPPPPPPAPAPAPVPDSARPPPAVAKRPPVPPKRQENPGHPGGAGGGEQDFMSDLMKALQKKRGNVS

SEQ ID NO: 614 - protein, 763 aa, Homo sapiens
MAATGTAAAAATGRLLLLLLVGLTAPALALAGYIEALAANAGTGFAVAEPQIAMFCGKLNMHVNIQTGKWEPDPTGTKSCFETKEEVLQYCQEMYPELQITNVMEANQRVSIDNWCRRDKKQCKSRFVTPFKCLVGEFVSDVLLVPEKCQFFHKERMEVCENHQHWHTVVKEACLTQGMTLYSYGMLLPCGVDQFHGTEYVCCPQTKIIGSVSKEEEEEDEEEEEEEDEEEDYDVYKSEFPTEADLEDFTEAAVDEDDEDEEEGEEVVEDRDYYYDTFKGDDYNEENPTEPGSDGTMSDKEITHDVKAVCSQEAMTGPCRAVMPRWYFDLSKGKCVRFIYGGCGGNRNNFESEDYCMAVCKAMIPPTPLPTNDVDVYFETSADDNEHARFQKAKEQLEIRHRNRMDRVKKEWEEAELQAKNLPKAERQTLIQHFQAMVKALEKEAASEKQQLVETHLARVEAMLNDRRRMALENYLAALQSDPPRPHRILQALRRYVRAENKDRLHTIRHYQHVLAVDPEKAAQMKSQVMTHLHVIEERRNQSLSLLYKVPYVAQEIQEEIDELLQEQRADMDQFTASISETPVDVRVSSEESEEIPPFHPFHPFPALPENEDTQPELYHPMKKGSGVGEQDGGLIGAEEKVINSKNKVDENMVIDETLDVKEMIFNAERVGGLEEERESVGPLREDFSLSSSALIGLLVIAVAIATVIVISLVMLRKRQYGTISHGIVEVDPMLTPEERHLNKMQNHGYENPTYKYLEQMQI

SEQ ID NO: 615 - protein, 1205 aa, Homo sapiens
MTKKEEPPPSRVPRAVRVASLLSEGEELSGDDQGDEEEDDHAYEGVPNGGWHTSSLSLSLPSTIAAPHPMDGPPGGSTPVTPVIKAGWLDKNPPQGSYIYQKRWVRLDTDHLRYFDSNKDAYSKRFISVACISHVAAIGDQKFEVITNNRTFAFRAESDVERKEWMQALQQAMAEQRARARLSSAYLLGVPGSEQPDRAGSLELRGFKNKLYVAVVGDKVQLYKNLEEYHLGIGITFIDMSVGNVKEVDRRSFDLTTPYRIFSFSADSELEKEQWLEAMQGAIAEALSTSEVAERIWAAAPNRFCADCGAPQPDWASINLCVVICKRCAGEHRGLGAGVSKVRSLKMDRKVWTETLIELFLQLGNGAGNRFWAANVPPSEALQPSSSPSTRRCHLEAKYREGKYRRYHPLFGNQEELDKALCAAVTTTDLAETQALLGCGAGINCFSGDPEAPTPLALAEQAGQTLQMEFLRNNRTTEVPRLDSMKPLEKHYSVVLPTVSHSGFLYKTASAGKLLQDRRAREEFSRRWCVLGDGVLSYFENERAVTPNGEIRASEIVCLAVPPPDTHGFEHTFEVYTEGERLYLFGLESAEQAHEWVKCIAKAFVPPLAEDLLARDFERLGRLPYKAGLSLQRAQEGWFSLSGSELRAVFPEGPCEEPLQLRKLQELSIQGDSENQVLVLVERRRTLYIQGERRLDFMGWLGAIQKAAASMGDTLSEQQLGDSDIPVIVYRCVDYITQCGLTSEGIYRKCGQTSKTQRLLESLRQDARSVHLKEGEQHVDDVSSALKRFLRDLPDGLFTRAQRLTWLEASEIEDEEEKVSRYRELLVRLPPVNRATVKALISHLYCVQCFSDTNQMNVHNLAIVFGPTLFQTDGQDYKAGRVVEDLINHYVVVFSVDEEELRKQREEITAIVKMRVAGTASGTQHAGDFICTVYLEEKKAETEQHIKVPASMTAEELTLEILDRRNVGIREKDYWTCFEVNEREEAERPLHFAEKVLPILHGLGTDSHLVVKKHQAMEAMLLYLASRVGDTKHGMMKFREDRSLLGLGLPSGGFHDRYFILNSSCLRLYKEVRSQRPWSGAPETSHRPEKEWPIKSLKVYLGVKKKLRPPTCWGFTVVHETEKHEKQQWYLCCDTQMELREWFATFLFVQHDGLVWPSEPSRVSRAVPEVRLGSVSLIPLRGSENEMRRSVAAFTADPLSLLRNV

SEQ ID NO: 616 - protein, 475 aa, Homo sapiens
MQKSTNSDTSVETLNSTRQGTGAVQMRIKNANSHHDRLSQSKSMILTDVGKVTEPISRHRRNHSQHILKDVIPPLEQLMVEKEGYLQKAKIADGGKKLRKNWSTSWIVLSSRRIEFYKESKQQALSNMKTGHKPESVDLCGAHIEWAKEKSSRKNVFQITTVSGNEFLLQSDIDFIILDWFHAIKNAIDRLPKDSSCPSRNLELFKIQRSSSTELLSHYDSDIKEQKPEHRKSLMFRLHHSASDTSDKNRVKSRLKKFITRRPSLKTLQEKGLIKDQIFGSHLHKVCERENSTVPWFVKQCIEAVEKRGLDVDGIYRVSGNLATIQKLRFIVNQEEKLNLDDSQWEDIHVVTGALKMFFRELPEPLFPYSFFEQFVEAIKKQDNNTRIEAVKSLVQKLPPPNRDTMKVLFGHLTKIVAKASKNLMSTQSLGIVFGPTLLRAENETGNMAIHMVYQNQIAELMLSEYSKIFGSEED

SEQ ID NO: 617 - protein, 638 aa, Homo sapiens
MSLGQSACLFLSIARSRSVMTGEQMAAFHPSSTPNPLERPIKMGWLKKQRSIVKNWQQRYFVLRAQQLYYYKDEEDTKPQGCMYLPGCTIKEIATNPEEAGKFVFEIIPASWDQNRMGQDSYVLMASSQAEMEEWVKFLRRVAGTPCGVFGQRLDETVAYEQKFGPHLVPILVEKCAEFILEHGRNEEGIFRLPGQDNLVKQLRDAFDAGERPSFDRDTDVHTVASLLKLYLRDLPEPVVPWSQYEGFLLCGQLTNADEAKAQQELMKQLSILPRDNYSLLSYICRFLHEIQLNCAVNKMSVDNLATVIGVNLIRSKVEDPAVIMRGTPQIQRVMTMMIRDHEVLFPKSKDIPLSPPAQKNDPKKAPVARSSVGWDATEDLRISRTDSFSSMTSDSDTTSPTGQQPSDAFPEDSSKVPREKPGDWKMQSRKRTQTLPNRKCFLTSAFQGANSSKMEIFKNEFWSPSSEAKAGEGHRRTMSQDLRQLSDSQRTSTYDNVPSLPGSPGEEASALSSQACDSKGDTLASPNSETGPGKKNSGEEEIDSLQRMVQELRKEIETQKQMYEEQIKNLEKENYDVWAKVVRLNEELEKEKKKSAALEISLRNMERSREDVEKRNKALEEEVKEFVKSMKEPKTEA

SEQ ID NO: 618 - protein, 814 aa, Homo sapiens
MGLPALEFSDCCLDSPHFRETLKSHEAELDKTNKFIKELIKDGKSLISALKNLSSAKRKFADSLNEFKFQCIGDAETDDEMCIARSLQEFATVLRNLEDERIRMIENASEVLITPLEKFRKEQIGAAKEAKKKYDKETEKYCGILEKHLNLSSKKKESQLQEADSQVDLVRQHFYEVSLEYVFKVQEVQERKMFEFVEPLLAFLQGLFTFYHHGYELAKDFGDFKTQLTISIQNTRNRFEGTRSEVESLMKKMKENPLEHKTISPYTMEGYLYVQEKRHFGTSWVKHYCTYQRDSKQITMVPFDQKSGGKGGEDESVILKSCTRRKTDSIEKRFCFDVEAVDRPGVITMQALSEEDRRLWMEAMDGREPVYNSNKDSQSEGTAQLDSIGFSIIRKCIHAVETRGINEQGLYRIVGVNSRVQKLLSVLMDPKTASETETDICAEWEIKTITSALKTYLRMLPGPLMMYQFQRSFIKAAKLENQESRVSEIHSLVHRLPEKNRQMLQLLMNHLANVANNHKQNLMTVANLGVVFGPTLLRPQEETVAAIMDIKFQNIVIEILIENHEKIFNTVPDMPLTNAQLHLSRKKSSDSKPPSCSERPLTLFHTVQSTEKQEQRNSIINSSLESVSSNPNSILNSSSSLQPNMNSSDPDLAVVKPTRPNSLPPNPSPTSPLSPSWPMFSAPSSPMPTSSTSSDSSPVRSVAGFVWFSVAAVVLSLARSSLHAVFSLLVNFVPCHPNLHLLFDRPEEAVHEDSSTPFRKAKALYACKAEHDSELSFTAGTVFDNVHPSQEPGWLEGTLNGKTGLIPENYVEFL

SEQ ID NO: 619 - protein, 958 aa, Homo sapiens
MKEAKDARYTNGHLFTTISVSGMTMCYACNKSITAKEALICPTCNVTIHNRCKDTLANCTKVKQKQQKAALLKNNTALQSVSLRSKTTIRERPSSAIYPSDSFRQSLLGSRRGRSSLSLAKSVSTTNIAGHFNDESPLGLRRILSQSTDSLNMRNRTLSVESLIDEEVIYSELMSDFEMDEKDFAADSWSLAVDSSFLQQHKKEVMKQQDVIYELIQTELHHVRTLKIMTRLFRTGMLEELHLEPGVVQGLFPCVDELSDIHTRFLSQLLERRRQALCPGSTRNFVIHRLGDLLISQFSGPSAEQMCKTYSEFCSRHSKALKLYKELYARDKRFQQFIRKVTRPAVLKRHGVQECILLVTQRITKYPLLISRILQHSHGIEEERQDLTTALGLVKELLSNVDEGIYQLEKGARLQEIYNRMDPRAQTPVPGKGPFGREELLRRKLIHDGCLLWKTATGRFKDVLVLLMTDVLVFLQEKDQKYIFPTLDKPSVVSLQNLIVRDIANQEKGMFLISAAPPEMYEVHTASRDDRSTWIRVIQQSVRTCPSREDFPLIETEDEAYLRRIKMELQQKDRALVELLREKVGLFAEMTHFQAEEDGGSGMALPTLPRGLFRSESLESPRGERLLQDAIREVEGLKDLLVGPGVELLLTPREPALPLEPDSGGNTSPGVTANGEARTFNGSIELCRADSDSSQRDRNGNQLRSPQEEALQRLVNLYGLLHGLQAAVAQQDTLMEARFPEGPERREKLCRANSRDGEAGRAGAAPVAPEKQATELALLQRQHALLQEELRRCRRLGEERATEAGSLEARLRESEQARALLEREAEEARRQLAALGQTEPLPAEAPWARRPVDPRRRSLPAGDALYLSFNPPQPSRGTDRLDLPVTTRSVHRNFEDRERQELGSPEERLQDSSDPDTGSEEEGSSRLSPPHSPRDFTRMQDIPEETESRDGEAVASES

SEQ ID NO: 620 - protein, 418 aa, Homo sapiens
MGDKGTRVFKKASPNGKLTVYLGKRDFVDHIDLVDPVDGVVLVDPEYLKERRVYVTLTCAFRYGREDLDVLGLTFRKDLFVANVQSFPPAPEDKKPLTRLQERLIKKLGEHAYPFTFEIPPNLPCSVTLQPGPEDTGKACGVDYEVKAFCAENLEEKIHKRNSVRLVIRKVQYAPERPGPQPTAETTRQFLMSDKPLHLEASLDKEIYYHGEPISVNVHVTNNTNKTVKKIKISVRQYADICLFNTAQYKCPVAMEEADDTVAPSSTFCKVYTLTPFLANNREKRGLALDGKLKHEDTNLASSTLLREGANREILGIIVSYKVKVKLVVSRGGLLGDLASSDVAVELPFTLMHPKPKEEPPHREVPENETPVDTNLIELDTNDDDIVFEDFARQRLKGMKDDKEEEEDGTGSPQLNNR

SEQ ID NO: 621 - protein, 409 aa, Homo sapiens
MGEKPGTRVFKKSSPNCKLTVYLGKRDFVDHLDKVDPVDGVVLVDPDYLKDRKVFVTLTCAFRYGREDLDVLGLSFRKDLFIATYQAFPPVPNPPRPPTRLQDRLLRKLGQHAHPFFFTIPQNLPCSVTLQPGPEDTGKACGVDFEIRAFCAKSLEEKSHKRNSVRLVIRKVQFAPEKPGPQPSAETTRHFLMSDRSLHLEASLDKELYYHGEPLNVNVHVTNNSTKTVKKIKVSVRQYADICLFSTAQYKCPVAQLEQDDQVSPSSTFCKVYTITPLLSDNREKRGLALDGKLKHEDTNLASSTIVKEGANKEVLGILVSYRVKVKLVVSRGGDVSVELPFVLMHPKPHDHIPLPRPQSAAPETDVPVDTNLIEFDTNYATDDDIVFEDFARLRLKGMKDDDYDDQLC

SEQ ID NO: 622 - protein, 1129 aa, Homo sapiens
MRSSASRLSSFSSRDSLWNRMPDQISVSEFIAETTEDYNSPTTSSFTTRLHNCRNTVTLLEEALDQDRTALQKVKKSVKAIYNSGQDHVQNEENYAQVLDKFGSNFLSRDNPDLGTAFVKFSTLTKELSTLLKNLLQGLSHNVIFTLDSLLKGDLKGVKGDLKKPFDKAWKDYETKFTKIEKEKREHAKQHGMIRTEITGAEIAEEMEKERRLFQLQMCEYLIKVNEIKTKKGVDLLQNLIKYYHAQCNFFQDGLKTADKLKQYIEKLAADLYNIKQTQDEEKKQLTALRDLIKSSLQLDQKEDSQSRQGGYSMHQLQGNKEYGSEKKGYLLKKSDGIRKVWQRRKCSVKNGILTISHATSNRQPAKLNLLTCQVKPNAEDKKSFDLISHNRTYHFQAEDEQDYVAWISVLTNSKEEALTMAFRGEQSAGENSLEDLTKAIIEDVQRLPGNDICCDCGSSEPTWLSTNLGILTCIECSGIHREMGVHISRIQSLELDKLGTSELLLAKNVGNNSFNDIMEANLPSPSPKPTPSSDMTVRKEYITAKYVDHRFSRKTCSTSSAKLNELLEAIKSRDLLALIQVYAEGVELMEPLLEPGQELGETALHLAVRTADQTSLHLVDFLVQNCGNLDKQTALGNTVLHYCSMYSKPECLKLLLRSKPTVDIVNQAGETALDIAKRLKATQCEDLLSQAKSGKFNPHVHVEYEWNLRQEEIDESDDDLDDKPSPIKKERSPRPQSFCHSSSISPQDKLALPGFSTPRDKQRLSYGAFTNQIFVSTSTDSPTSPTTEAPPLPPRNAGKGPTGPPSTLPLSTQTSSGSSTLSKKRPPPPPPGHKRTLSDPPSPLPHGPPNKGAVPWGNDGGPSSSSKTTNKFEGLSQQSSTSSAKTALGPRVLPKLPQKVALRKTDHLSLDKATIPPEIFQKSSQLAELPQKPPPGDLPPKPTELAPKPQIGDLPPKPGELPPKPQLGDLPPKPQLSDLPPKPQMKDLPPKPQLGDLLAKSQTGDVSPKAQQPSEVTLKSHPLDLSPNVQSRDAIQKQASEDSNDLTPTLPETPVPLPRKINTGKNKVRRVKTIYDCQADNDDELTFIEGEVIIVTGEEDQEWWIGHIEGQPERKGVFPVSFVHILSD

SEQ ID NO: 623 - protein, 1458 aa, Homo sapiens
MVNTRKSSLRLLGSKSPGPGPGPGAGAEPGATGGSSHFISSRTRSSKTRAASCPAAKAGGSGGAGVTLDEARKVEVDGSLSDSHVSPPAKRTLKQPDSVCKDKSKSRSTGQREEWNLSTGQARLTSQPGATLPNGHSGLSLRSHPLRGEKKGDGDLSCINGDMEVRKSCRSRKNRFESVNQSLLFDQLVNSTAEAVLQEMDNINIRRNRRSGEVERLRMWTDTEFENMDMYSRVKRRRKSLRRNSYGIQNHHEVSTEGEEEESQEEDGDIEVEEAEGEENDRPYNLRQRKTVDRYQAPPIVPAHQKKRENTLFDIHRSPARRSHIRRKKHAIHSSDTTSSDEERFERRKSKSMARARNRCLPMNFRAEDLASGILRERVKVGASLADVDPMNIDKSVRFDSIGGLSHHIHALKEMVVFPLLYPEIFEKFKIQPPRGCLFYGPPGTGKTLVARALANECSQGDKKVAFFMRKGADCLSKWVGESERQLRLLFDQAYLMRPSIIFFDEIDGLAPVRSSRQDQIHSSIVSTLLALMDGLDNRGEIVVIGATNRLDSIDPALRRPGRFDREFLFNLPDQKARKHILQIHTRDWNPKLSDAFLGELAEKCVGYCGADIKALCTEAALIALRRRYPQIYASSHKLQLDVSSIVLSAQDFYHAMQNIVPASQRAVMSSGHALSPIIRPLLERSFNNILAVLQKVFPHAEISQSDKKEDIETLILEDSEDENALSIFETNCHSGSPKKQSSSAAIHKPYLHFTMSPYHQPTSYRPRLLLSGERGSGQTSHLAPALLHTLERFSVHRLDLPALYSVSAKTPEESCAQIFREARRTVPSIVYMPHIGDWWEAVSETVRATFLTLLQDIPSFSPIFLLSTSETMYSELPEEVKCIFRIQYEEVLYIQRPIEEDRRKFFQELILNQASMAPPRRKHAALCAMEVLPLALPSPPRQLSESEKSRMEDQEENTLRELRLFLRDVTKRLATDKRFNIFSKPVDIEEVSDYLEVIKEPMDLSTVITKIDKHNYLTAKDFLKDIDLICSNALEYNPDKDPGDKIIRHRACTLKDTAHAIIAAELDPEFNKLCEEIKEARIKRGLSVTSEQINPHSTGARKTETRVEEAFRHKQRNPMDVWHNSANKCAFRVRRKSRRRSQWGKGIIKKRKVNNLKKDEEDTKFADYENHTEDRKLLENGEFEVSTDCHEENGEETGDLSMTNDESSCDIMDLDQGQRLNNGAGTKENFASTEEESSNESLLVNSSSSLNPEQTSRKETFLKGNCLNGEASTDSFEGIPVLECQNGKLEVVSFCDSGDKCSSEQKILLEDQSKEKPETSTENHGDDLEKLEALECSNNEKLEPGSDVEVKDAELDKEGASKVKKYRKLILEQAKTTSLELVPEEPSEPVPPLIVDRERLKKLLDLLVDKSNNLAVDQLERLYSLLSQCIYRHRKDYDKSQLVEEMERTVHMFETFL

SEQ ID NO: 624 - protein, 682 aa, Homo sapiens
MASPDRSKRKILKAKKTMPLSCRKQVEMLNKSRNVEALKTAIGSNVPSGNQSFSPSVITRTTEITKCSPSENGASSLDSNKNSISEKSKVFSQNCIKPVEEIVHSETKLEQVVCSYQKPSRTTESPSRVFTEEAKDSLNTSENDSEHQTNVTRSLFEHEGACSLKSSCCPPSVLSGVVQMPESTVTSTVGDKKTDQMVFHLETNSNSESHDKRQSDNILCSEDSGFVPVEKTPNLVNSVTSNNCADDILKTDECSRTSISNCESADSTWQSSLDTNNNSHYQKKRMFSENEENVKRMKTSEQINENICVSLERQTAFLEQVRHLIQQEIYSINYELFDKKLKELNQRIGKTECRNKHEGIADKLLAKIAKLQRRIKTVLLFQRNCLKPNMLSSNGASKVANSEAMILDKNLESVNSPIEKSSVNYEPSNPSEKGSKKINLSSDQNKSVSESNNDDVMLISVESPNLTTPITSNPTDTRKITSGNSSNSPNAEVMAVQKKLDSIIDLTKEGLSNCNTESPVSPLESHSKAASNSKETTPLAQNAVQVPESFEHLPPLPEPPAPLPELVDKTRDTLPPQKPELKVKRVFRPNGIALTWNITKINPKCAPVESYHLFLCHENSNNKLIWKKIGEIKALPLPMACTLSQFLASNRYYFTVQSKDIFGRYGPFCDIKSIPGFSENLT

SEQ ID NO: 625 - protein, 3056 aa, Homo sapiens
MSLVLNDLLICCRQLEHDRATERKKEVEKFKRLIRDPETIKHLDRHSDSKQGKYLNWDAVFRFLQKYIQKETECLRIAKPNVSASTQASRQKKMQEISSLVKYFIKCANRRAPRLKCQELLNYIMDTVKDSSNGAIYGADCSNILLKDILSVRKYWCEISQQQWLELFSVYFRLYLKPSQDVHRVLVARIIHAVTKGCCSQTDGLNSKFLDFFSKAIQCARQEKSSSGLNHILAALTIFLKTLAVNFRIRVCELGDEILPTLLYIWTQHRLNDSLKEVIIELFQLQIYIHHPKGAKTQEKGAYESTKWRSILYNLYDLLVNEISHIGSRGKYSSGFRNIAVKENLIELMADICHQVFNEDTRSLEISQSYTTTQRESSDYSVPCKRKKIELGWEVIKDHLQKSQNDFDLVPWLQIATQLISKYPASLPNCELSPLLMILSQLLPQQRHGERTPYVLRCLTEVALCQDKRSNLESSQKSDLLKLWNKIWCITFRGISSEQIQAENFGLLGAIIQGSLVEVDREFWKLFTGSACRPSCPAVCCLTLALTTSIVPGTVKMGIEQNMCEVNRSFSLKESIMKWLLFYQLEGDLENSTEVPPILHSNFPHLVLEKILVSLTMKNCKAAMNFFQSVPECEHHQKDKEELSFSEVEELFLQTTFDKMDFLTIVRECGIEKHQSSIGFSVHQNLKESLDRCLLGLSEQLLNNYSSEITNSETLVRCSRLLVGVLGCYCYMGVIAEEEAYKSELFQKAKSLMQCAGESITLFKNKTNEEFRIGSLRNMMQLCTRCLSNCTKKSPNKIASGFFLRLLTSKLMNDIADICKSLASFIKKPFDRGEVESMEDDTNGNLMEVEDQSSMNLFNDYPDSSVSDANEPGESQSTIGAINPLAEEYLSKQDLLFLDMLKFLCLCVTTAQTNTVSFRAADIRRKLLMLIDSSTLEPTKSLHLHMYLMLLKELPGEEYPLPMEDVLELLKPLSNVCSLYRRDQDVCKTILNHVLHVVKNLGQSNMDSENTRDAQGQFLTVIGAFWHLTKERKYIFSVRMALVNCLKTLLEADPYSKWAILNVMGKDFPVNEVFTQFLADNHHQVRMLAAESINRLFQDTKGDSSRLLKALPLKLQQTAFENAYLKAQEGMREMSHSAENPETLDEIYNRKSVLLTLIAVVLSCSPICEKQALFALCKSVKENGLEPHLVKKVLEKVSETFGYRRLEDFMASHLDYLVLEWLNLQDTEYNLSSFPFILLNYTNIEDFYRSCYKVLIPHLVIRSHFDEVKSIANQIQEDWKSLLTDCFPKILVNILPYFAYEGTRDSGMAQQRETATKVYDMLKSENLLGKQIDHLFISNLPEIVVELLMTLHEPANSSASQSTDLCDFSGDLDPAPNPPHFPSHVIKATFAYISNCHKTKLKSILEILSKSPDSYQKILLAICEQAAETNNVYKKHRILKIYHLFVSLLLKDIKSGLGGAWAFVLRDVIYTLIHYINQRPSCIMDVSLRSFSLCCDLLSQVCQTAVTYCKDALENHLHVIVGTLIPLVYEQVEVQKQVLDLLKYLVIDNKDNENLYITIKLLDPFPDHVVFKDLRITQQKIKYSRGPFSLLEEINHFLSVSVYDALPLTRLEGLKDLRRQLELHKDQMVDIMRASQDNPQDGIMVKLVVNLLQLSKMAINHTGEKEVLEAVGSCLGEVGPIDFSTIAIQHSKDASYTKALKLFEDKELQWTFIMLTYLNNTLVEDCVKVRSAAVTCLKNILATKTGHSFWEIYKMTTDPMLAYLQPFRTSRKKFLEVPRFDKENPFEGLDDINLWIPLSENHDIWIKTLTCAFLDSGGTKCEILQLLKPMCEVKTDFCQTVLPYLIHDILLQDTNESWRNLLSTHVQGFFTSCLRHFSQTSRSTTPANLDSESEHFFRCCLDKKSQRTMLAVVDYMRRQKRPSSGTIFNDAFWLDLNYLEVAKVAQSCAAHFTALLYAEIYADKKSMDDQEKRSLAFEEGSQSTTISSLSEKSKEETGISLQDLLLEIYRSIGEPDSLYGCGGGKMLQPITRLRTYEHEAMWGKALVTYDLETAIPSSTRQAGIIQALQNLGLCHILSVYLKGLDYENKDWCPELEELHYQAAWRNMQWDHCTSVSKEVEGTSYHESLYNALQSLRDREFSTFYESLKYARVKEVEEMCKRSLESVYSLYPTLSRLQAIGELESIGELFSRSVTHRQLSEVYIKWQKHSQLLKDSDFSFQEPIMALRTVILEILMEKEMDNSQRECIKDILTKHLVELSILARTFKNTQLPERAIFQIKQYNSVSCGVSEWQLEEAQVFWAKKEQSLALSILKQMIKKLDASCAANNPSLKLTYTECLRVCGNWLAETCLENPAVIMQTYLEKAVEVAGNYDGESSDELRNGKMKAFLSLARFSDTQYQRIENYMKSSEFENKQALLKRAKEEVGLLREHKIQTNRYTVKVQRELELDELALRALKEDRKRFLCKAVENYINCLLSGEEHDMWVFRLCSLWLENSGVSEVNGMMKRDGMKIPTYKFLPLMYQLAARMGTKMMGGLGFHEVLNNLISRISMDHPHHTLFIILALANANRDEFLTKPEVARRSRITKNVPKQSSQLDEDRTEAANRIICTIRSRRPQMVRSVEALCDAYIILANLDATQWKTQRKGINIPADQPITKLKNLEDVVVPTMEIKVDHTGEYGNLVTIQSFKAEFRLAGGVNLPKIIDCVGSDGKERRQLVKGRDDLRQDAVMQQVFQMCNTLLQRNTETRKRKLTICTYKVVPLSQRSGVLEWCTGTVPIGEFLVNNEDGAHKRYRPNDFSAFQCQKKMMEVQKKSFEEKYEVFMDVCQNFQPVFRYFCMEKFLDPAIWFEKRLAYTRSVATSSIVGYILGLGDRHVQNILINEQSAELVHIDLGVAFEQGKILPTPETVPFRLTRDIVDGMGITGVEGVFRRCCEKTMEVMRNSQETLLTIVEVLLYDPLFDWTMNPLKALYLQQRPEDETELHPTLNADDQECKRNLSDIDQSFNKVAERVLMRLQEKLKGVEEGTVLSVGGQVNLLIQQAIDPKNLSRLFPGWKAWV

SEQ ID NO: 626 - protein, 511 aa, Homo sapiens
MALRAMRGIVNGAAPELPVPTGGPAVGAREQALAVSRNYLSQPRLTYKTVSGVNGPLVILDHVKFPRYAEIVHLTLPDGTKRSGQVLEVSGSKAVVQVFEGTSGIDAKKTSCEFTGDILRTPVSEDMLGRVFNGSGKPIDRGPVVLAEDFLDIMGQPINPQCRIYPEEMIQTGISAIDGMNSIARGQKIPIFSAAGLPHNEIAAQICRQAGLVKKSKDVVDYSEENFAIVFAAMGVNMETARFFKSDFEENGSMDNVCLFLNLANDPTIERIITPRLALTTAEFLAYQCEKHVLVILTDMSSYAEALREVSAAREEVPGRRGFPGYMYTDLATIYERAGRVEGRNGSITQIPILTMPNDDITHPIPDLTGYITEGQIYVDRQLHNRQIYPPINVLPSLSRLMKSAIGEGMTRKDHADVSNQLYACYAIGKDVQAMKAVVGEEALTSDDLLYLEFLQKFERNFIAQGPYENRTVFETLDIGWQLLRIFPKEMLKRIPQSTLSEFYPRDSAKH

SEQ ID NO: 627 - protein, 736 aa, Homo sapiens
MSLSENSVFAYESSVHSTNVLLSLNDQRKKDVLCDVTIFVEGQRFRAHRSVLAACSSYFHSRIVGQADGELNITLPEEVTVKGFEPLIQFAYTAKLILSKENVDEVCKCVEFLSVHNIEESCFQFLKFKFLDSTADQQECPRKKCFSSHCQKTDLKLSLLDQRDLETDEVEEFLENKNVQTPQCKLRRYQGNAKASPPLQDSASQTYESMCLEKDAALALPSLCPKYRKFQKAFGTDRVRTGESSVKDIHASVQPNERSENECLGGVPECRDLQVMLKCDESKLAMEPEETKKDPASQCPTEKSEVTPFPHNSSIDPHGLYSLSLLHTYDQYGDLNFAGMQNTTVLTEKPLSGTDVQEKTFGESQDLPLKSDLGTREDSSVASSDRSSVEREVAEHLAKGFWSDICSTDTPCQMQLSPAVAKDGSEQISQKRSECPWLGIRISESPEPGQRTFTTLSSVNCPFISTLSTEGCSSNLEIGNDDYVSEPQQEPCPYACVISLGDDSETDTEGDSESCSAREQECEVKLPFNAQRIISLSRNDFQSLLKMHKLTPEQLDCIHDIRRRSKNRIAAQRCRKRKLDCIQNLESEIEKLQSEKESLLKERDHILSTLGETKQNLTGLCQKVCKEAALSQEQIQILAKYSAADCPLSFLISEKDKSTPDGELALPSIFSLSDRPPAVLPPCARGNSEPGYARGQESQQMSTATSEQAGPAEQCRQSGGISDFCQQMTDKCTTDE

SEQ ID NO: 628 - protein, 469 aa, Homo sapiens
MMSEHDLADVVQIAVEDLSPDHPVVLENHVVTDEDEPALKRQRLEINCQDPSIKSFLYSINQTICLRLDSIEAKLQALEATCKSLEEKLDLVTNKQHSPIQVPMVAGSPLGATQTCNKVRCAVPGRRQNTIVVKVPGQEDSHHEDGESGSEASDSVSSCGQAGSQSIGSNVTLITLNSEEDYPNGTWLGDENNPEMRVRCAIIPSDMLHISTNCRTAEKMALTLLDYLFHREVQAVSNLSGQGKHGKKQLDPLTIYGIRCHLFYKFGITESDWYRIKQSIDSKCRTAWRRKQRGQSLAVKSFSRRTPNSSSYCPSEPMMSTPPPASELPQPQPQPQALHYALANAQQVQIHQIGEDGQVQVIPQGHLHIAQVPQGEQVQITQDSEGNLQIHHVGQDGQVLQGAQLIAVASSDPAAAGVDGSPLQGSDIQVQYVQLAPVSDHTAGAQTAEALQPTLQPEMQLEHGAIQIQ

SEQ ID NO: 629 - protein, 2168 aa, Homo sapiens
MESGERLPSSAASSTTPTSSSTPSVASVVSKGGLSTGVASLSSTINPCGHLFRTAGDQPFNLSTVSSAFPMVSHPVFGLHSASSGHSEFGGLGTLGTPTALAAHPQLASFPGAEWWRTTDAHTRTGATFFPPLLGIPPLFAPPAQNHDSSSFHSRTSGKSNRNGPEKGVNGSINGSNTSSVIGINTSVLSTTASSSMGQTKSTSSGGGNRKCNQEQSKNQPLDARVDKIKDKKPRKKAMESSSNSDSDSGTSSDTSSEGISSSDSDDLEEDEEEEDQSIEESEDDDSDSESEAQHKSNNQVLLHGISDPKADGQKATEKAQEKRIHQPLPLASESQTHSFQSQQKQPQVLSQQLPFIFQSSQAKEESVNKHTSVIQSTGLVSNVKPLSLVNQAKKETYMKLIVPSPDVLKAGNKNTSEESSLLTSELRSKREQYKQAFPSQLKKQESSKSLKKVIAALSNPKATSSSPAHPKQTLENNHPNPFLTNALLGNHQPNGVIQSVIQEAPLALTTKTKMQSKINENIAAASSTPFSSPVNLSTSGRRTPGNQTPVMPSASPILHSQGKEKAVSNNVNPVKTQHHSHPAKSLVEQFRGTDSDIPSSKDSEDSNEDEEEDDEEEDEEDDEDDESDDSQSESDSNSESDTEGSEEEDDDDKDQDESDSDTEGEKTSMKLNKTTSSVKSPSMSLTGHSTPRNLHIAKAPGSAPAALCSESQSPAFLGTSSSTLTSSPHSGTSKRRRVTDERELRIPLEYGWQRETRIRNFGGRLQGEVAYYAPCGKKLRQYPEVIKYLSRNGIMDISRDNFSFSAKIRVGDFYEARDGPQGMQWCLLKEEDVIPRIRAMEGRRGRPPNPDRQRAREESRMRRRKGRPPNVGNAEFLDNADAKLLRKLQAQEIARQAAQIKLLRKLQKQEQARVAKEAKKQQAIMAAEEKRKQKEQIKIMKQQEKIKRIQQIRMEKELRAQQILEAKKKKKEEAANAKLLEAEKRIKEKEMRRQQAVLLKHQERERRRQHMMLMKAMEARKKAEEKERLKQEKRDEKRLNKERKLEQRRLELEMAKELKKPNEDMCLADQKPLPELPRIPGLVLSGSTFSDCLMVVQFLRNFGKVLGFDVNIDVPNLSVLQEGLLNIGDSMGEVQDLLVRLLSAAVCDPGLITGYKAKTALGEHLLNVGVNRDNVSEILQIFMEAHCGQTELTESLKTKAFQAHTPAQKASVLAFLINELACSKSVVSEIDKNIDYMSNLRRDKWVVEGKLRKLRIIHAKKTGKRDTSGGIDLGEEQHPLGTPTPGRKRRRKGGDSDYDDDDDDDSDDQGDEDDEDEEDKEDKKGKKTDICEDEDEGDQAASVEELEKQIEKLSKQQSQYRRKLFDASHSLRSVMFGQDRYRRRYWILPQCGGIFVEGMESGEGLEEIAKEREKLKKAESVQIKEEMFETSGDSLNCSNTDHCEQKEDLKEKDNTNLFLQKPGSFSKLSKLLEVAKMPPESEVMTPKPNAGANGCTLSYQNSGKHSLGSVQSTATQSNVEKADSNNLFNTGSSGPGKFYSPLPNDQLLKTLTEKNRQWFSLLPRTPCDDTSLTHADMSTASLVTPQSQPPSKSPSPTPAPLGSSAQNPVGLNPFALSPLQVKGGVSMMGLQFCGWPTGVVTSNIPFTSSVPSLGSGLGLSEGNGNSFLTSNVASSKSESPVPQNEKATSAQPAAVEVAKPVDFPSPKPIPEEMQFGWWRIIDPEDLKALLKVLHLRGIREKALQKQIQKHLDYITQACLKNKDVAIIELNENEENQVTRDIVENWSVEEQAMEMDLSVLQQVEDLERRVASASLQVKGWMCPEPASEREDLVYFEHKSFTKLCKEHDGEFTGEDESSAHALERKSDNPLDIAVTRLADLERNIERRIEEDIAPGLRVWRRALSEARSAAQVALCIQQLQKSIAWEKSIMKVYCQICRKGDNEELLLLCDGCDKGCHTYCHRPKITTIPDGDWFCPACIAKASGQTLKIKKLHVKGKKTNESKKGKKVTLTGDTEDEDSASTSSSLKRGNKDLKKRKMEENTSINLSKQESFTSVKKPKRDDSKDLALCSMILTEMETHEDAWPFLLPVNLKLVPGYKKVIKKPMDFSTIREKLSSGQYPNLETFALDVRLVFDNCETFNEDDSDIGRAGHNMRKYFEKKWTDTFKVS

SEQ ID NO: 630 - protein, 239 aa, Homo sapiens
MAHAGRTGYDNREIVMKYIHYKLSQRGYEWDAGDVGAAPPGAAPAPGIFSSQPGHTPHPAASRDPVARTSPLQTPAAPGAAAGPALSPVPPVVHLTLRQAGDDFSRRYRRDFAEMSSQLHLTPFTARGRFATVVEELFRDGVNWGRIVAFFEFGGVMCVESVNREMSPLVDNIALWMTEYLNRHLHTWIQDNGGWDAFVELYGPSMRPLFDFSWLSLKTLLSLALVGACITLGAYLGHK

SEQ ID NO: 631 - protein, 120 aa, Homo sapiens
MESKEELAANNLNGENAQQENEGGEQAPTQNEEESRHLGGGEGQKPGGNIRRGRVRRLVPNFRWAIPNRHIEHNEARDDVERFVGQMMEIKRKTREQQMRHYMRFQTPEPDNHYDFCLIP

SEQ ID NO: 632 - protein, 662 aa, Homo sapiens
MKKFSRMPKSEGGSGGGAAGGGAGGAGAGAGCGSGGSSVGVRVFAVGRHQVTLEESLAEGGFSTVFLVRTHGGIRCALKRMYVNNMPDLNVCKREITIMKELSGHKNIVGYLDCAVNSISDNVWEVLILMEYCRAGQVVNQMNKKLQTGFTEPEVLQIFCDTCEAVARLHQCKTPIIHRDLKVENILLNDGGNYVLCDFGSATNKFLNPQKDGVNVVEEEIKKYTTLSYRAPEMINLYGGKPITTKADIWALGCLLYKLCFFTLPFGESQVAICDGNFTIPDNSRYSRNIHCLIRFMLEPDPEHRPDIFQVSYFAFKFAKKDCPVSNINNSSIPSALPEPMTASEAAARKSQIKARITDTIGPTETSIAPRQRPKANSATTATPSVLTIQSSATPVKVLAPGEFGNHRPKGALRPGNGPEILLGQGPPQQPPQQHRVLQQLQQGDWRLQQLHLQHRHPHQQQQQQQQQQQQQQQQQQQQQQQQQQQHHHHHHHHLLQDAYMQQYQHATQQQQMLQQQFLMHSVYQPQPSASQYPTMMPQYQQAFFQQQMLAQHQPSQQQASPEYLTSPQEFSPALVSYTSSLPAQVGTIMDSSYSANRSVADKEAIANFTNQKNISNPPDMSGWNPFGEDNFSKLTEEELLDREFDLLRSSKGHLKAYFASQ

SEQ ID NO: 633 - protein, 1058 aa, Homo sapiens
MRRKGRCHRGSAARHPSSPCSVKHSPTRETLTYAQAQRMVEIEIEGRLHRISIFDPLEIILEDDLTAQEMSECNSNKENSERPPVCLRTKRHKNNRVKKKNEALPSAHGTPASASALPEPKVRIVEYSPPSAPRRPPVYYKFIEKSAEELDNEVEYDMDEEDYAWLEIVNEKRKGDCVPAVSQSMFEFLMDRFEKESHCENQKQGEQQSLIDEDAVCCICMDGECQNSNVILFCDMCNLAVHQECYGVPYIPEGQWLCRHCLQSRARPADCVLCPNKGGAFKKTDDDRWGHVVCALWIPEVGFANTVFIEPIDGVRNIPPARWKLTCYLCKQKGVGACIQCHKANCYTAFHVTCAQKAGLYMKMEPVKELTGGGTTFSVRKTAYCDVHTPPGCTRRPLNIYGDVEMKNGVCRKESSVKTVRSTSKVRKKAKKAKKALAEPCAVLPTVCAPYIPPQRLNRIANQVAIQRKKQFVERAHSYWLLKRLSRNGAPLLRRLQSSLQSQRSSQQRENDEEMKAAKEKLKYWQRLRHDLERARLLIELLRKREKLKREQVKVEQVAMELRLTPLTVLLRSVLDQLQDKDPARIFAQPVSLKEVPDYLDHIKHPMDFATMRKRLEAQGYKNLHEFEEDFDLIIDNCMKYNARDTVFYRAAVRLRDQGGVVLRQARREVDSIGLEEASGMHLPERPAAAPRRPFSWEDVDRLLDPANRAHLGLEEQLRELLDMLDLTCAMKSSGSRSKRAKLLKKEIALLRNKLSQQHSQPLPTGPGLEGFEEDGAALGPEAGEEVLPRLETLLQPRKRSRSTCGDSEVEEESPGKRLDAGLTNGFGGARSEQEPGGGLGRKATPRRRCASESSISSSNSPLCDSSFNAPKCGRGKPALVRRHTLEDRSELISCIENGNYAKAARIAAEVGQSSMWISTDAAASVLEPLKVVWAKCSGYPSYPALIIDPKMPRVPGHHNGVTIPAPPLDVLKIGEHMQTKSDEKLFLVLFFDNKRSWQWLPKSKMVPLGIDETIDKLKMMEGRNSSIRKAVRIAFDRAMNHLSRVHGEPTSDLSDID

SEQ ID NO: 634 - protein, 722 aa, Homo sapiens
MSAESGPGTRLRNLPVMGDGLETSQMSTTQAQAQPQPANAASTNPPPPETSNPNKPKRQTNQLQYLLRVVLKTLWKHQFAWPFQQPVDAVKLNLPDYYKIIKTPMDMGTIKKRLENNYYWNAQECIQDFNTMFTNCYIYNKPGDDIVLMAEALEKLFLQKINELPTEETEIMIVQAKGRGRGRKETGTAKPGVSTVPNTTQASTPPQTQTPQPNPPPVQATPHPFPAVTPDLIVQTPVMTVVPPQPLQTPPPVPPQPQPPPAPAPQPVQSHPPIIAATPQPVKTKKGVKRKADTTTPTTIDPIHEPPSLPPEPKTTKLGQRRESSRPVKPPKKDVPDSQQHPAPEKSSKVSEQLKCCSGILKEMFAKKHAAYAWPFYKPVDVEALGLHDYCDIIKHPMDMSTIKSKLEAREYRDAQEFGADVRLMFSNCYKYNPPDHEVVAMARKLQDVFEMRFAKMPDEPEEPVVAVSSPAVPPPTKVVAPPSSSDSSSDSSSDSDSSTDDSEEERAQRLAELQEQLKAVHEQLAALSQPQQNKPKKKEKDKKEKKKEKHKRKEEVEENKKSKAKEPPPKKTKKNNSSNSNVSKKEPAPMKSKPPPTYESEEEDKCKPMSYEEKRQLSLDINKLPGEKLGRVVHIIQSREPSLKNSNPDEIEIDFETLKPSTLRELERYVTSCLRKKRKPQAEKVDVIAGSSKMKGFSSSESESSSESSSSDSEDSETGPA

SEQ ID NO: 635 - protein, 171 aa, Homo sapiens
MHPFYTRAATMIGEIAAAVSFISKFLRTKGLTSERQLQTFSQSLQELLAEHYKHHWFPEKPCKGSGYRCIRINHKMDPLIGQAAQRIGLSSQELFRLLPSELTLWVDPYEVSYRIGEDGSICVLYEASPAGGSTQNSTNVQMVDSRISCKEELLLGRTSPSKNYNMMTVSG

SEQ ID NO: 636 - protein, 291 aa, Homo sapiens
MSQEGVELEKSVRRLREKFHGKVSSKKAGALMRKFGSDHTGVGRSIVYGVKQKDGQELSNDLDAQDPPEDMKQDRDIQAVATSLLPLTEANLRMFQRAQDDLIPAVDRQFACSSCDHVWWRRVPQRKEVSRCRKCRKRYEPVPADKMWGLAEFHCPKCRHNFRGWAQMGSPSPCYGCGFPVYPTRILPPRWDRDPDRRSTHTHSCSAADCYNRREPHVPGTSCAHPKSRKQNHLPKVLHPSNPHISSGSTVATCLSQGGLLEDLDNLILEDLKEEEEEEEEVEDEEGGPRE

SEQ ID NO: 637 - protein, 166 aa, Homo sapiens
MEAGPHPRPGHCCKPGGRLDMNHGFVHHIRRNQIARDDYDKKVKQAAKEKVRRRHTPAPTRPRKPDLQVYLPRHRDVSAHPRNPDYEESGESSSSGGSELEPSGHQLFCLEYEADSGEVTSVIVYQGDDPGKVSEKVSAHTPLDPPMREALKLRIQEEIAKRQSQH

SEQ ID NO: 638 - protein, 357 aa, Homo sapiens; identical to SEQ ID NO: 98

SEQ ID NO: 639 - protein, 495 aa, Homo sapiens
MATTATCTRFTDDYQLFEELGKGAFSVVRRCVKKTSTQEYAAKIINTKKLSARDHQKLEREARICRLLKHPNIVRLHDSISEEGFHYLVFDLVTGGELFEDIVAREYYSEADASHCIHQILESVNHIHQHDIVHRDLKPENLLLASKCKGAAVKLADFGLAIEVQGEQQAWFGFAGTPGYLSPEVLRKDPYGKPVDIWACGVILYILLVGYPPFWDEDQHKLYQQIKAGAYDFPSPEWDTVTPEAKNLINQMLTINPAKRITADQALKHPWVCQRSTVASMMHRQETVECLRKFNARRKLKGAILTTMLVSRNFSAAKSLLNKKSDGGVKEPQTTVVHNATDGIKGSTESCNTTTEDEDLKVRKQEIIKITEQLIEAINNGDFEAYTKICDPGLTSFEPEALGNLVEGMDFHKFYFENLLSKNSKPIHTTILNPHVHVIGEDAACIAYIRLTQYIDGQGRPRTSQSEETRVWHRRDGKWLNVHYHCSGAPAAPLQ

SEQ ID NO: 640 - protein, 475 aa, Homo sapiens
MADMQNLVERLERAVGRLEAVSHTSDMHRGYADSPSKAGAAPYVQAFDSLLAGPVAEYLKISKEIGGDVQKHAEMVHTGLKLERALLVTASQCQQPAENKLSDLLAPISEQIKEVITFREKNRGSKLFNHLSAVSESIQALGWVAMAPKPGPYVKEMNDAAMFYTNRVLKEYKDVDKKHVDWVKAYLSIWTELQAYIKEFHTTGLAWSKTGPVAKELSGLPSGPSAGSCPPPPPPCPPPPPVSTISCSYESASRSSLFAQINQGESITHALKHVSDDMKTHKNPALKAQSGPVRSGPKPFSAPKPQTSPSPKRATKKEPAVLELEGKKWRVENQENVSNLVIEDTELKQVAYIYKCVNTTLQIKGKINSITVDNCKKLGLVFDDVVGIVEIINSKDVKVQVMGKVPTISINKTDGCHAYLSKNSLDCEIVSAKSSEMNVLIPTEGGDFNEFPVPEQFKTLWNGQKLVTTVTEIAG

SEQ ID NO: 641 - protein, 703 aa, Homo sapiens
MADRRRQRASQDTEDEESGASGSDSGGSPLRGGGSCSGSAGGGGSGSLPSQRGGRTGALHLRRVESGGAKSAEESECESEDGIEGDAVLSDYESAEDSEGEEGEYSEEENSKVELKSEANDAVNSSTKEEKGEEKPDTKSTVTGERQSGDGQESTEPVENKVGKKGPKHLDDDEDRKNPAYIPRKGLFFEHDLRGQTQEEEVRPKGRQRKLWKDEGRWEHDKFREDEQAPKSRQELIALYGYDIRSAHNPDDIKPRRIRKPRYGSPPQRDPNWNGERLNKSHRHQGLGGTLPPRTFINRNAAGTGRMSAPRNYSRSGGFKEGRAGFRPVEAGGQHGGRSGETVKHEISYRSRRLEQTSVRDPSPEADAPVLGSPEKEEAASEPPAAAPDAAPPPPDRPIEKKSYSRARRTRTKVGDAVKLAEEVPPPPEGLIPAPPVPETTPTPPTKTGTWEAPVDSSTSGLEQDVAQLNIAEQNWSPGQPSFLQPRELRGMPNHIHMGAGPPPQFNRMEEMGVQGGRAKRYSSQRQRPVPEPPAPPVHISIMEGHYYDPLQFQGPIYTHGDSPAPLPPQGMLVQPGMNLPHPGLHPHQTPAPLPNPGLYPPPVSMSPGQPPPQQLLAPTYFSAPGVMNFGNPSYPYAPGALPPPPPPHLYPNTQAPSQVYGGVTYYNPAQQQVQPKPSPPRRTPQPVTIKPPPPEVVSRGSS

SEQ ID NO: 642 - protein, 496 aa, Homo sapiens
MDFSRNLYDIGEQLDSEDLASLKFLSLDYIPQRKQEPIKDALMLFQRLQEKRMLEESNLSFLKELLFRINRLDLLITYLNTRKEEMERELQTPGRAQISAYRFHFCRMSWAEANSQCQTQSVPFWRRVDHLLIRVMLYQISEEVSRSELRSFKFLLQEEISKCKLDDDMNLLDIFIEMEKRVILGEGKLDILKRVCAQINKSLLKIINDYEEFSKGEELCGVMTISDSPREQDSESQTLDKVYQMKSKPRGYCLIINNHNFAKAREKVPKLHSIRDRNGTHLDAGALTTTFEELHFEIKPHDDCTVEQIYEILKIYQLMDHSNMDCFICCILSHGDKGIIYGTDGQEAPIYELTSQFTGLKCPSLAGKPKVFFIQACQGDNYQKGIPVETDSEEQPYLEMDLSSPQTRYIPDEADFLLGMATVNNCVSYRNPAEGTWYIQSLCQSLRERCPRGDDILTILTEVNYEVSNKDDKKNMGKQMPQPTFTLRKKLVFPSD

SEQ ID NO: 643 - protein, 251 aa, Homo sapiens
MELSAIGEQVFAVESIRKKRVRKGKVEYLVKWKGWPPKYSTWEPEEHILDPRLVMAYEEKEERDRASGYRKRGPKPKRLLLQRLYSMDLRSSHKAKGKEKLCFSLTCPLGSGSPEGVVKAGAPELVDKGPLVPTLPFPLRKPRKAHKYLRLSRKKFPPRGPNLESHSHRRELFLQEPPAPDVLQAAGEWEPAAQPPEEEADADLAEGPPPWTPALPSSEVTVTDITANSITVTFREAQAAEGFFRDRSGKF

SEQ ID NO: 644 - protein, 292 aa, Homo sapiens
MELLCCEGTRHAPRAGPDPRLLGDQRVLQSLLRLEERYVPRASYFQCVQREIKPHMRKMLAYWMLEVCEEQRCEEEVFPLAMNYLDRYLSCVPTRKAQLQLLGAVCMLLASKLRETTPLTIEKLCIYTDHAVSPRQLRDWEVLVLGKLKWDLAAVIAHDFLAFILHRLSLPRDRQALVKKHAQTFLALCATDYTFAMYPPSMIATGSIGAAVQGLGACSMSGDELTELLAGITGTEVDCLRACQEQIEAALRESLREASQTSSSPAPKAPRGSSSQGPSQTSTPTDVTAIHL

SEQ ID NO: 645 - protein, 344 aa, Homo sapiens
MKDLGAEHLAGHEGVQLLGLLNVYLEQEERFQPREKGLSLIEATPENDNTLCPGLRNAKVEDLRSLANFFGSCTETFVLAVNILDRFLALMKVKPKHLSCIGVCSFLLAARIVEEDCNIPSTHDVIRISQCKCTASDIKRMEKIISEKLHYELEATTALNFLHLYHTIILCHTSERKEILSLDKLEAQLKACNCRLIFSKAKPSVLALCLLNLEVETLKSVELLEILLLVKKHSKINDTEFFYWRELVSKCLAEYSSPECCKPDLKKLVWIVSRRTAQNLHNSYYSVPELPTIPEGGCFDESESEDSCEDMSCGEESLSSSPPSDQECTFFFNFKVAQTLCFPS

SEQ ID NO: 646 - protein, 663 aa, Homo sapiens
MASGRGASSRWFFTREQLENTPSRRCGVEADKELSCRQQAANLIQEMGQRLNVSQLTINTAIVYMHRFYMHHSFTKFNKNIISSTALFLAAKVEEQARKLEHVIKVAHACLHPLEPLLDTKCDAYLQQTQELVILETIMLQTLGFEITIEHPHTDVVKCTQLVRASKDLAQTSYFMATNSLHLTTFCLQYKPTVIACVCIHLACKWSNWEIPVSTDGKHWWEYVDPTVTLELLDELTHEFLQILEKTPNRLKKIRNWRANQAARKPKVDGQVSETPLLGSSLVQNSILVDSVTGVPTNPSFQKPSTSAFPAPVPLNSGNISVQDSHTSDNLSMLATGMPSTSYGLSSHQEWPQHQDSARTEQLYSQKQETSLSGSQYNINFQQGPSISLHSGLHHRPDKISDHSSVKQEYTHKAGSSKHHGPISTTPGIIPQKMSLDKYREKRKLETLDLDVRDHYIAAQVEQQHKQGQSQAASSSSVTSPIKMKIPIANTEKYMADKKEKSGSLKLRIPIPPTDKSASKEELKMKIKVSSSERHSSSDEGSGKSKHSSPHISRDHKEKHKEHPSSRHHTSSHKHSHSHSGSSSGGSKHSADGIPPTVLRSPVGLSSDGISSSSSSSRKRLHVNDASHNHHSKMSKSSKSSGGLRTSQHPRETGQEASGDQRS

SEQ ID NO: 647 - protein, 378 aa, Homo sapiens
MDLGKPMKSVLVVALLVIFQVCLCQDEVTDDYIGDNTTVDYTLFESLCSKKDVRNFKAWFLPIMYSIICFVGLLGNGLVVLTYIYFKRLKTMTDTYLLNLAVADILFLLTLPFWAYSAAKSWVFGVHFCKLIFAIYKMSFFSGMLLLLCISIDRYVAIVQAVSAHRHRARVLLISKLSCVGIWILATVLSIPELLYSDLQRSSSEQAMRCSLITEHVEAFITIQVAQMVIGFLVPLLAMSFCYLVIIRTLLQARNFERNKAIKVIIAVVVVFIVFQLPYNGVVLAQTVANFNITSSTCELSKQLNIAYDVTYSLACVRCCVNPFLYAFIGVKFRNDLFKLFKDLGCLSQEQLRQWSSCRHIRRSSMSVEAETTTTFSP

SEQ ID NO: 648 - protein, 281 aa, Homo sapiens
MSAQESCLSLIKYFLFVFNLFFFVLGSLIFCFGIWILIDKTSFVSFVGLAFVPLQIWSKVLAISGIFTMGIALLGCVGALKELRCLLGLYFGMLLLLFATQITLGILISTQRAQLERSLRDVVEKTIQKYGTNPEETAAEESWDYVQFQLRCCGWHYPQDWFQVLILRGNGSEAHRVPCSCYNLSATNDSTILDKVILPQLSRLGHLARSRHSADICAVPAESHIYREGCAQGLQKWLHNNLISIVGICLGVGLLELGFMTLSIFLCRNLDHVYNRLARYR

SEQ ID NO: 649 - protein, 652 aa, Homo sapiens
MATSMGLLLLLLLLLTQPGAGTGADTEAVVCVGTACYTAHSGKLSAAEAQNHCNQNGGNLATVKSKEEAQHVQRVLAQLLRREAALTARMSKFWIGLQREKGKCLDPSLPLKGFSWVGGGEDTPYSNWHKELRNSCISKRCVSLLLDLSQPLLPSRLPKWSEGPCGSPGSPGSNIEGFVCKFSFKGMCRPLALGGPGQVTYTTPFQTTSSSLEAVPFASAANVACGEGDKDETQSHYFLCKEKAPDVFDWGSSGPLCVSPKYGCNFNNGGCHQDCFEGGDGSFLCGCRPGFRLLDDLVTCASRNPCSSSPCRGGATCVLGPHGKNYTCRCPQGYQLDSSQLDCVDVDECQDSPCAQECVNTPGGFRCECWVGYEPGGPGEGACQDVDECALGRSPCAQGCTNTDGSFHCSCEEGYVLAGEDGTQCQDVDECVGPGGPLCDSLCFNTQGSFHCGCLPGWVLAPNGVSCTMGPVSLGPPSGPPDEEDKGEKEGSTVPRAATASPTRGPEGTPKATPTTSRPSLSSDAPITSAPLKMLAPSGSPGVWREPSIHHATAASGPQEPAGGDSSVATQNNDGTDGQKLLLFYILGTVVAILLLLALALGLLVYRKRRAKREEKKEKKPQNAADSYSWVPERAESRAMENQYSPTPGTDC

SEQ ID NO: 650 - protein, 742 aa, Homo sapiens
MGGRVFLAFCVWLTLPGAETQDSRGCARWCPQNSSCVNATACRCNPGFSSFSEIITTPTETCDDINECATPSKVSCGKFSDCWNTEGSYDCVCSPGYEPVSGAKTFKNESENTCQDVDECSSGQHQCDSSTVCFNTVGSYSCRCRPGWKPRHGIPNNQKDTVCEDMTFSTWTPPPGVHSQTLSRFFDKVQDLGRDSKTSSAEVTIQNVIKLVDELMEAPGDVEALAPPVRHLIATQLLSNLEDIMRILAKSLPKGPFTYISPSNTELTLMIQERGDKNVTMGQSSARMKLNWAVAAGAEDPGPAVAGILSIQNMTTLLANASLNLHSKKQAELEEIYESSIRGVQLRRLSAVNSIFLSHNNTKELNSPILFAFSHLESSDGEAGRDPPAKDVMPGPRQELLCAFWKSDSDRGGHWATEGCQVLGSKNGSTTCQCSHLSSFAILMAHYDVEDWKLTLITRVGLALSLFCLLLCILTFLLVRPIQGSRTTIHLHLCICLFVGSTIFLAGIENEGGQVGLRCRLVAGLLHYCFLAAFCWMSLEGLELYFLVVRVFQGQGLSTRWLCLIGYGVPLLIVGVSAAIYSKGYGRPRYCWLDFEQGFLWSFLGPVTFIILCNAVIFVTTVWKLTQKFSEINPDMKKLKKARALTITAIAQLFLLGCTWVFGLFIFDDRSLVLTYVFTILNCLQGAFLYLLHCLLNKKVREEYRKWACLVAGGSKYSEFTSTTSGTGHNQTRALRASESGI

SEQ ID NO: 651 - protein, 213 aa, Homo sapiens
MPDENIFLFVPNLIGYARIVFAIISFYFMPCCPLTASSFYLLSGLLDAFDGHAARALNQGTRFGAMLDMLTDRCSTMCLLVNLALLYPGATLFFQISMSLDVASHWLHLHSSVVRGSESHKMIDLSGNPVLRIYYTSRPALFTLCAGNELFYCLLYLFHFSEGPLVGSVGLFRMGLWVTAPIALLKSLISVIHLITAARNMAALDAADRAKKK

SEQ ID NO: 652 - protein, 1584 aa, Homo sapiens
MSLTSWFLVSSGGTRHRLPREMIFVGRDDCELMLQSRSVDKQHAVINYDASTDEHLVKDLGSLNGTFVNDVRIPEQTYITLKLEDKLRFGYDTNLFTVVQGEMRVPEEALKHEKFTIQLQLSQKSSESELSKSASAKSIDSKVADAATEVQHKTTEALKSEEKAMDISAMPRGTPLYGQPSWWGDDEVDEKRAFKTNGKPEEKNHEAGTSGCGIDAKQVEEQSAAANEEVLFPFCREPSYFEIPTKEFQQPSQITESTIHEIPTKDTPSSHITGAGHASFTIEFDDSTPGKVTIRDHVTKFTSDQRHKSKKSSPGTQDLLGIQTGMMAPENKVADWLAQNNPPQMLWERTEEDSKSIKSDVPVYLKRLKGNKHDDGTQSDSENAGAHRRCSKRATLEEHLRRHHSEHKKLQKVQATEKHQDQAVTSSAHHRGGHGVPHGKLLKQKSEEPSVSIPFLQTALLRSSGSLGHRPSQEMDKMLKNQATSATSEKDNDDDQSDKGTYTIELENPNSEEVEARKMIDKVFGVDDNQDYNRPVINEKHKDLIKDWALSSAAAVMEERKPLTTSGFHHSEEGTSSSGSKRWVSQWASLAANHTRHDQEERIMEFSAPLPLENETEISESGMTVRSTGSATSLASQGERRRRTLPQLPNEEKSLESHRAKVVTQRSEIGEKQDTELQEKETPTQVYQKDKQDADRPLSKMNRAVNGETLKTGGDNKTLLHLGSSAPGKEKSETDKETSLVKQTLAKLQQQEQREEAQWTPTKLSSKNVSGQTDKCREETFKQESQPPEKNSGHSTSKGDRVAQSESKRRKAEEILKSQTPKGGDKKESSKSLVRQGSFTIEKPSPNIPIELIPHINKQTSSTPSSLALTSASRIRERSESLDPDSSMDTTLILKDTEAVMAFLEAKLREDNKTDEGPDTPSYNRDNSISPESDVDTASTISLVTGETERKSTQKRKSFTSLYKDRCSTGSPSKDVTKSSSSGAREKMEKKTKSRSTDVGSRADGRKFVQSSGRIRQPSVDLTDDDQTSSVPHSAISDIMSSDQETYSCKPHGRTPLTSADEHVHSKLEGSKVTKSKTSPVVSGSSSKSTTLPRPRPTRTSLLRRARLGEASDSELADADKASVASEVSTTSSTSKPPTGRRNISRIDLLAQPRRTRLGSLSARSDSEATISRSSASSRTAEAIIRSGARLVPSDKFSPRIRANSISRLSDSKVKSMTSAHGSASVNSRWRRFPTDYASTSEDEFGSNRNSPKHTRLRTSPALKTTRLQSAGSAMPTSSSFKHRIKEQEDYIRDWTAHREEIARISQDLALIAREINDVAGEIDSVTSSGTAPSTTVSTAATTPGSAIDTREELVDRVFDESLNFRKIPPLVHSKTPEGNNGRSGDPRPQAAEPPDHLTITRRRTWSRDEVMGDNLLLSSVFQFSKKIRQSIDKTAGKIRILFKDKDRNWDDIESKLRAESEVPIVKTSSMEISSILQELKRVEKQLQAINAMIDPDGTLEALNNMGFPSAMLPSPPKQKSSPVNNHHSPGQTPTLGQPEARALHPAAVSAAAEFENAESEADFSIHFNRFNPDGEEEDVTVQE

SEQ ID NO: 653 - protein, 757 aa, Homo sapiens
MALGEEKAEAEASEDTKAQSYGRGSCRERELDIPGPMSGEQPPRLEAEGGLISPVWGAEGIPAPTCWIGTDPGGPSRAHQPQASDANREPVAERSEPALSGLPPATMGSGDLLLSGESQVEKTKLSSSEEFPQTLSLPRTTTICSGHDADTEDDPSLADLPQALDLSQQPHSSGLSCLSQWKSVLSPGSAAQPSSCSISASSTGSSLQGHQERAEPRGGSLAKVSSSLEPVVPQEPSSVVGLGPRPQWSPQPVFSGGDASGLGRRRLSFQAEYWACVLPDSLPPSPDRHSPLWNPNKEYEDLLDYTYPLRPGPQLPKHLDSRVPADPVLQDSGVDLDSFSVSPASTLKSPTNVSPNCPPAEATALPFSGPREPSLKQWPSRVPQKQGGMGLASWSQLASTPRAPGSRDARWERREPALRGAKDRLTIGKHLDMGSPQLRTRDRGWPSPRPEREKRTSQSARRPTCTESRWKSEEEVESDDEYLALPARLTQVSSLVSYLGSISTLVTLPTGDIKGQSPLEVSDSDGPASFPSSSSQSQLPPGAALQGSGDPEGQNPCFLRSFVRAHDSAGEGSLGSSQALGVSSGLLKTRPSLPARLDRWPFSDPDVEGQLPRKGGEQGKESLVQCVKTFCCQLEELICWLYNVADVTDHGTAARSNLTSLKSSLQLYRQFKKDIDEHQSLTESVLQKGEILLQCLLENTPVLEDVLGRIAKQSGELESHADRLYDSILASLDMLAGCTLIPDKKPMAAMEHPCEGV

SEQ ID NO: 654 - protein, 1966 aa, Homo sapiens
MKAADTVILWARSKNDQLRISFPPGLCWGDRMPDKDDIRLLPSALGVKKRKRGPKKQKENKPGKPRKRKKRDSEEEFGSERDEYREKSESGGSEYGTGPGRKRRRKHREKKEKKTKRRKKGEGDGGQKQVEQKSSATLLLTWGLEDVEHVFSEEDYHTLTNYKAFSQFMRPLIAKKNPKIPMSKMMTILGAKWREFSANNPFKGSAAAVAAAAAAAAAAVAEQVSAAVSSATPIAPSGPPALPPPPAADIQPPPIRRAKTKEGKGPGHKRRSKSPRVPDGRKKLRGKKMAPLKIKLGLLGGKRKKGGSYVFQSDEGPEPEAEESDLDSGSVHSASGRPDGPVRTKKLKRGRPGRKKKKVLGCPAVAGEEEVDGYETDHQDYCEVCQQGGEIILCDTCPRAYHLVCLDPELDRAPEGKWSCPHCEKEGVQWEAKEEEEEYEEEGEEEGEKEEEDDHMEYCRVCKDGGELLCCDACISSYHIHCLNPPLPDIPNGEWLCPRCTCPVLKGRVQKILHWRWGEPPVAVPAPQQADGNPDVPPPRPLQGRSEREFFVKWVGLSYWHCSWAKELQLEIFHLVMYRNYQRKNDMDEPPPLDYGSGEDDGKSDKRKVKDPHYAEMEEKYYRFGIKPEWMTVHRIINHSVDKKGNYHYLVKWRDLPYDQSTWEEDEMNIPEYEEHKQSYWRHRELIMGEDPAQPRKYKKKKKELQGDGPPSSPTNDPTVKYETQPRFITATGGTLHMYQLEGLNWLRFSWAQGTDTILADEMGLGKTIQTIVFLYSLYKEGHTKGPFLVSAPLSTIINWEREFQMWAPKFYVVTYTGDKDSRAIIRENEFSFEDNAIKGGKKAFKMKREAQVKFHVLLTSYELITIDQAALGSIRWACLVVDEAHRLKNNQSKFFRVLNGYKIDHKLLLTGTPLQNNLEELFHLLNFLTPERFNNLEGFLEEFADISKEDQIKKLHDLLGPHMLRRLKADVFKNMPAKTELIVRVELSPMQKKYYKYILTRNFEALNSRGGGNQVSLLNIMMDLKKCCNHPYLFPVAAMESPKLPSGAYEGGALIKSSGKLMLLQKMLRKLKEQGHRVLIFSQMTKMLDLLEDFLDYEGYKYERIDGGITGALRQEAIDRFNAPGAQQFCFLLSTRAGGLGINLATADTVIIFDSDWNPHNDIQAFSRAHRIGQANKVMIYRFVTRASVEERITQVAKRKMMLTHLVVRPGLGSKAGSMSKQELDDILKFGTEELFKDENEGENKEEDSSVIHYDNEAIARLLDRNQDATEDTDVQNMNEYLSSFKVAQYVVREEDKIEEIEREIIKQEENVDPDYWEKLLRHHYEQQQEDLARNLGKGKRVRKQVNYNDAAQEDQDNQSEYSVGSEEEDEDFDERPEGRRQSKRQLRNEKDKPLPPLLARVGGNIEVLGFNTRQRKAFLNAVMRWGMPPQDAFTTQWLVRDLRGKTEKEFKAYVSLFMRHLCEPGADGSETFADGVPREGLSRQQVLTRIGVMSLVKKKVQEFEHINGRWSMPELMPDPSADSKRSSRASSPTKTSPTTPEASATNSPCTSKPATPAPSEKGEGIRTPLEKEEAENQEEKPEKNSRIGEKMETEADAPSPAPSLGERLEPRKIPLEDEVPGVPGEMEPEPGYRGDREKSEDVKGDRELRPGPRDEPRSNGRREEKTEKPRFMFNIADGGFTELHTLWQNEERAAISSGKLNEIWHRRHDYWLLAGIVLHGYARWQDIQNDAQFAIINEPFKTEANKGNFLEMKNKFLARRFKLLEQALVIEEQLRRAAYLNLSQEPAHPAMALHARFAEAECLAESHQHLSKESLAGNKPANAVLHKVLNQLEELLSDMKADVTRLPATLSRIPPIAARLQMSERSILSRLASKGTEPHPTPAYPPGPYATPPGYGAAFSAAPVGALAAAGANYSQMPAGSFITAATNGPPVLVKKEKEMVGALVSDGLDRKEPRAGEVICIDD

SEQ ID NO: 655 - protein, 199 aa, Homo sapiens
MSNMEKHLFNLKFAAKELSRSAKKCDKEEKAEKAKIKKAIQKGNMEVARIHAENAIRQKNQAVNFLRMSARVDAVAARVQTAVTMGKVTKSMAGVVKSMDATLKTMNLEKISALMDKFEHQFETLDVQTQQMEDTMSSTTTLTTPQNQVDMLLQEMADEAGLDLNMELPQGQTGSVGTSVASAEQDELSQRLARLRDQV

SEQ ID NO: 656 - protein, 453 aa, Homo sapiens
MWSPEREAEAPAGGDPAGLLPPEWEEDEERMSFLFSAFKRSREVNSTDWDSKMGFWAPLVLSHSRRQGVVRLRLRDLQEAFQRKGSVPLGLATVLQDLLRRGELQRESDFMASVDSSWISWGVGVFLLKPLKWTLSNMLGDNKVPAEEVLVAVELLKEKAEEVYRLYQNSPLSSHPVVALSELSTLCANSCPDERTFYLVLLQLQKEKRVTVLEQNGEKIVKFARGPRAKVSPVNDVDVGVYQLMQSEQLLSRKVESLSQEAERCKEEARRACRAGKKQLALRSLKAKQRTEKRIEALHAKLDTVQGILDRIYASQTDQMVFNAYQAGVGALKLSMKDVTVEKAESLVDQIQELCDTQDEVSQTLAGGVTNGLDFDSEELEKELDILLQDTTKEPLDLPDNPRNRHFTNSVPNPRISDAELEAELEKLSLSEGGLVPSSKSPKRQLEPTLKPL

SEQ ID NO: 657 - protein, 352 aa, Homo sapiens
MKPALLEVMRMNRICRMVLATCLGSFILVIFYFQSMLHPVMRRNPFGVDICCRKGSRSPLQELYNPIQLELSNTAVLHQMRRDQVTDTCRANSATSRKRRVLTPNDLKHLVVDEDHELIYCYVPKVACTNWKRLMMVLTGRGKYSDPMEIPANEAHVSANLKTLNQYSIPEINHRLKSYMKFLFVREPFERLVSAYRNKFTQKYNISFHKRYGTKIIKRQRKNATQEALRKGDDVKFEEFVAYLIDPHTQREEPFNEHWQTVYSLCHPCHIHYDLVGKYETLEEDSNYVLQLAGVGSYLKFPTYAKSTRTTDEMTTEFFQNISSEHQTQLYEVYKLDFLMFNYSVPSYLKLE

SEQ ID NO: 658 - protein, 312 aa, Homo sapiens
MADFGISAGQFVAVVWDKSSPVEALKGLVDKLQALTGNEGRVSVENIKQLLQSAHKESSFDIILSGLVPGSTTLHSAEILAEIARILRPGGCLFLKEPVETAVDNNSKVKTASKLCSALTLSGLVEVKELQREPLTPEEVQSVREHLGHESDNLLFVQITGKKPNFEVGSSRQLKLSITKKSSPSVKPAVDPAAAKLWTLSANDMEDDSMDLIDSDELLDPEDLKKPDPASLRAASCGEGKKRKACKNCTCGLAEELEKEKSREQMSSQPKSACGNCYLGDAFRCASCPYLGMPAFKPGEKVLLSDSNLHDA

SEQ ID NO: 659 - protein, 237 aa, Homo sapiens
MTSEITYAEVRFKNEFKSSGINTASSAASKERTAPHKSNTGFPKLLCASLLIFFLLLAISFFIAFVIFFQKYSQLLEKKTTKELVHTTLECVKKNMPVEETAWSCCPKNWKSFSSNCYFISTESASWQDSEKDCARMEAHLLVINTQEEQDFIFQNLQEESAYFVGLSDPEGQRHWQWVDQTPYNESSTFWHPREPSDPNERCVVLNFRKSPKRWGWNDVNCLGPQRSVCEMMKIHL

SEQ ID NO: 660 - protein, 481 aa, Homo sapiens
MRHSKRTHCPDWDSRESWGHESYRGSHKRKRRSHSSTQENRHCKPHHQFKESDCHYLEARSLNERDYRDRRYVDEYRNDYCEGYVPRHYHRDIESGYRIHCSKSSVRSRRSSPKRKRNRHCSSHQSRSKSHRRKRSRSIEDDEEGHLICQSGDVLRARYEIVDTLGEGAFGKVVECIDHGMDGMHVAVKIVKNVGRYREAARSEIQVLEHLNSTDPNSVFRCVQMLEWFDHHGHVCIVFELLGLSTYDFIKENSFLPFQIDHIRQMAYQICQSINFLHHNKLTHTDLKPENILFVKSDYVVKYNSKMKRDERTLKNTDIKVVDFGSATYDDEHHSTLVSTRHYRAPEVILALGWSQPCDVWSIGCILIEYYLGFTVFQTHDSKEHLAMMERILGPIPQHMIQKTRKRKYFHHNQLDWDEHSSAGRYVRRRCKPLKEFMLCHDEEHEKLFDLVRRMLEYDPTQRITLDEALQHPFFDLLKKK

SEQ ID NO: 661 - protein, 278 aa, Homo sapiens [sequence omitted]

SEQ ID NO: 662 - protein, 327 aa, Homo sapiens
MTMESGAENQQSGDAAVTEAENQQMTVQAQPQIATLAQVSMPAAHATSSAPTVTLVQLPNGQTVQVHGVIQAAQPSVIQSPQVQTVQISTIAESEDSQESVDSVTDSQKRREILSRRPSYRKILNDLSSDAPGVPRIEEEKSEEETSAPAITTVTVPTPIYQTSSGQYIAITQGGAIQLANNGTDGVQGLQTLTMTNAAATQPGTTILQYAQTTDGQQILVPSNQVVVQAASGDVQTYQIRTAPTSTIAPGVVMASSPALPTQPAEEAARKREVRLMKNREAARECRRKKKEYVKCLENRVAVLENQNKTLIEELKALKDLYCHKSD

SEQ ID NO: 663 - protein, 2442 aa, Homo sapiens
MAENLLDGPPNPKRAKLSSPGFSANDSTDFGSLFDLENDLPDELIPNGGELGLLNSGNLVPDAASKHKQLSELLRGGSGSSINPGIGNVSASSPVQQGLGGQAQGQPNSANMASLSAMGKSPLSQGDSSAPSLPKQAASTSGPTPAASQALNPQAQKQVGLATSSPATSQTGPGICMNANFNQTHPGLLNSNSGHSLINQASQGQAQVMNGSLGAAGRGRGAGMPYPTPAMQGASSSVLAETLTQVSPQMTGHAGLNTAQAGGMAKMGITGNTSPFGQPFSQAGGQPMGATGVNPQLASKQSMVNSLPTFPTDIKNTSVTNVPNMSQMQTSVGIVPTQAIATGPTADPEKRKLIQQQLVLLLHAHKCQRREQANGEVRACSLPHCRTMKNVLNHMTHCQAGKACQVAHCASSRQIISHWKNCTRHDCPVCLPLKNASDKRNQQTILGSPASGIQNTIGSVGTGQQNATSLSNPNPIDPSSMQRAYAALGLPYMNQPQTQLQPQVPGQQPAQPQTHQQMRTLNPLGNNPMNIPAGGITTDQQPPNLISESALPTSLGATNPLMNDGSNSGNIGTLSTIPTAAPPSSTGVRKGWHEHVTQDLRSHLVHKLVQAIFPTPDPAALKDRRMENLVAYAKKVEGDMYESANSRDEYYHLLAEKIYKIQKELEEKRRSRLHKQGILGNQPALPAPGAQPPVIPQAQPVRPPNGPLSLPVNRMQVSQGMNSFNPMSLGNVQLPQAPMGPRAASPMNHSVQMNSMGSVPGMAISPSRMPQPPNMMGAHTNNMMAQAPAQSQFLPQNQFPSSSGAMSVGMGQPPAQTGVSQGQVPGAALPNPLNMLGPQASQLPCPPVTQSPLHPTPPPASTAAGMPSLQHTTPPGMTPPQPAAPTQPSTPVSSSGQTPTPTPGSVPSATQTQSTPTVQAAAQAQVTPQPQTPVQPPSVATPQSSQQQPTPVHAQPPGTPLSQAAASIDNRVPTPSSVASAETNSQQPGPDVPVLEMKTETQAEDTEPDPGESKGEPRSEMMEEDLQGASQVKEETDIAEQKSEPMEVDEKKPEVKVEVKEEEESSSNGTASQSTSPSQPRKKIFKPEELRQALMPTLEALYRQDPESLPFRQPVDPQLLGIPDYFDIVKNPMDLSTIKRKLDTGQYQEPWQYVDDVWLMFNNAWLYNRKTSRVYKFCSKLAEVFEQEIDPVMQSLGYCCGRKYEFSPQTLCCYGKQLCTIPRDAAYYSYQNRYHFCEKCFTEIQGENVTLGDDPSQPQTTISKDQFEKKKNDTLDPEPFVDCKECGRKMHQICVLHYDIIWPSGFVCDNCLKKTGRPRKENKFSAKRLQTTRLGNHLEDRVNKFLRRQNHPEAGEVFVRVVASSDKTVEVKPGMKSRFVDSGEMSESFPYRTKALFAFEEIDGVDVCFFGMHVQEYGSDCPPPNTRRVYISYLDSIHFFRPRCLRTAVYHEILIGYLEYVKKLGYVTGHIWACPPSEGDDYIFHCHPPDQKIPKPKRLQEWYKKMLDKAFAERIIHDYKDIFKQATEDRLTSAKELPYFEGDFWPNVLEESIKELEQEEEERKKEESTAASETTEGSQGDSKNAKKKNNKKTNKNKSSISRANKKKPSMPNVSNDLSQKLYATMEKHKEVFFVIHLHAGPVINTLPPIVDPDPLLSCDLMDGRDAFLTLARDKHWEFSSLRRSKWSTLCMLVELHTQGQDRFVYTCNECKHHVETRWHCTVCEDYDLCINCYNTKSHAHKMVKWGLGLDDEGSSQGEPQSKSPQESRRLSIQRCIQSLVHACQCRNANCSLPSCQKMKRVVQHTKGCKRKTNGGCPVCKQLIALCCYHAKHCQENKCPVPFCLNIKHKLRQQQIQHRLQQAQLMRRRMATMNTRNVPQQSLPSPTSAPPGTPTQQPSTPQTPQPPAQPQPSPVSMSPAGFPSVARTQPPTTVSTGKPTSQVPAPPPPAQPPPAAVEAARQIEREAQQQQHLYRVNINNSMPPGRTGMGTPGSQMAPVSLNVPRPNQVSGPVMPSMPPGQWQQAPLPQQQPMPGLPRPVISMQAQAAVAGPRMPSVQPPRSISPSALQDLLRTLKSPSSPQQQQQVLNILKSNPQLMAAFIKQRTAKYVANQPGMQPQPGLQSQPGMQPQPGMHQQPSLQNLNAMQAGVPRPGVPPQQQAMGGLNPQGQALNIMNPGHNPNMASMNPQYREMLRRQLLQQQQQQQQQQQQQQQQQQGSAGMAGGMAGHGQFQQPQGPGGYPPAMQQQQRMQQHLPLQGSSMGQMAAQMGQLGQMGQPGLGADSTPNIQQALQQRILQQQQMKQQIGSPGQPNPMSPQQHMLSGQPQASHLPGQQIATSLSNQVRSPAPVQSPRPQSQPPHSSPSPRIQPQPSPHHVSPQTGSPHPGLAVTMASSIDQGHLGNPEQSAMLPQLNTPSRSALSSELSLVGDTTGDTLEKFVEGL

SEQ ID NO: 664 - protein, 442 aa, Homo sapiens
MRGAMELEPELLLQEARENVEAAQSYRRELGHRLEGLREARRQIKESASQTRDVLKQHFNDLKGTLGKLLDERLVTLLQEVDTIEQETIKPLDDCQKLIEHGVNTAEDLVREGEIAMLGGVGEENEKLWSFTKKASHIQLDSLPEVPLLVDVPCLSAQLDDSILNIVKDHIFKHGTVASRPPVQIEELIEKPGGIIVRWCKVDDDFTAQDYRLQFRKCTSNHFEDVYVGSETEFIVLHIDPNVDYQFRVCARGDGRQEWSPWSVPQIGHSTLVPHEWTAGFEGYSLSSRRNIALRNDSESSGVLYSRAPTYFCGQTLTFRVETVGQPDRRDSIGVCAEKQDGYDSLQRDQAVCISTNGAVFVNGKEMTNQLPAVTSGSTVTFDIEAVTLGTTSNNEGGHFKLRVTISSNNREVVFDWLLDQSCGSLYFGCSFFYPGWKVLVF

SEQ ID NO: 665 - protein, 619 aa, Homo sapiens
MAASPGSGSANPRKFSEKIALHTQRQAEETRAFEQLMTDLTLSRVQFQKLQQLRLTQYHGGSLPNVSQLRSSASEFQPSFHQADNVRGTRHHGLVERPSRNRFHPLHRRSGDKPGRQFDGSAFGANYSSQPLDESWPRQQPPWKDEKHPGFRLTSALNRTNSDSALHTSALSTKPQDPYGGGGQSAWPAPYMGFCDGENNGHGEVASFPGPLKEENLLNVPKPLPKQLWETKEIQSLSGRPRSCDVGGGNAFPHNGQNLGLSPFLGTLNTGGSLPDLTNLHYSTPLPASLDTTDHHFGSMSVGNSVNNIPAAMTHLGIRSSSGLQSSRSNPSIQATLNKTVLSSSLNNHPQTSVPNASALHPSLRLFSLSNPSLSTTNLSGPSRRRQPPVSPLTLSPGPEAHQGFSRQLSSTSPLAPYPTSQMVSSDRSQLSFLPTEAQAQVSPPPPYPAPQELTQPLLQQPRAPEAPAQQPQAASSLPQSDFQLLPAQGSSLTNFFPDVGFDQQSMRPGPAFPQQVPLVQQGSRELQDSFHLRPSPYSNCGSLPNTILPEDSSTSLFKDLNSALAGLPEVSLNVDTPFPLEEELQIEPLSLDGLNMLSDSSMGLLDPSVEETFRADRL

SEQ ID NO: 666 - protein, 520 aa, Homo sapiens
MSIPLKSSFLLSYLCTLPPALLSREILMADSEALPSLAGDPVAVEALLRAVFGVVVDEAIQKGTSVSQKVCEWKEPEELKQLLDLELRSQGESQKQILERCRAVIRYSVKTGHPRFFNQLFSGLDPHALAGRIITESLNTSQYTYEIAPVFVLMEEEVLRKLRALVGWSSGDGIFCPGGSISNMYAVNLARYQRYPDCKQRGLRTLPPLALFTSKECHYSIQKGAAFLGLGTDSVRVVKADERGKMVPEDLERQIGMAEAEGAVPFLVSATSGTTVLGAFDPLEAIADVCQRHGLWLHVDAAWGGSVLLSQTHRHLLDGIQRADSVAWNPHKLLAAGLQCSALLLQDTSNLLKRCHGSQASYLFQQDKFYDVALDTGDKVVQCGRRVDCLKLWLMWKAQGDQGLERRIDQAFVLARYLVEEMKKREGFELVMEPEFVNVCFWFVPPSLRGKQESPDYHERLSKVAPVLKERMVKEGSMMIGYQPHGTRGNFFRVVVANSALTCADMDFLLNELERLGQDL

SEQ ID NO: 667 - protein, 897 aa, Homo sapiens
MVLAQGLLSMALLALCWERSLAGAEETIPLQTLRCYNDYTSHITCRWADTQDAQRLVNVTLIRRVNEDLLEPVSCDLSDDMPWSACPHPRCVPRRCVIPCQSFVVTDVDYFSFQPDRPLGTRLTVTLTQHVQPPEPRDLQISTDQDHFLLTWSVALGSPQSHWLSPGDLEFEVVYKRLQDSWEDAAILLSNTSQATLGPEHLMPSSTYVARVRTRLAPGSRLSGRPSKWSPEVCWDSQPGDEAQPQNLECFFDGAAVLSCSWEVRKEVASSVSFGLFYKPSPDAGEEECSPVLREGLGSLHTRHHCQIPVPDPATHGQYIVSVQPRRAEKHIKSSVNIQMAPPSLNVTKDGDSYSLRWETMKMRYEHIDHTFEIQYRKDTATWKDSKTETLQNAHSMALPALEPSTRYWARVRVRTSRTGYNGIWSEWSEARSWDTESVLPMWVLALIVIFLTIAVLLALRFCGIYGYRLRRKWEEKIPNPSKSHLFQNGSAELWPPGSMSAFTSGSPPHQGPWGSRFPELEGVFPVGFGDSEVSPLTIEDPKHVCDPPSGPDTTPAASDLPTEQPPSPQPGPPAASHTPEKQASSFDFNGPYLGPPHSRSLPDILGQPEPPQEGGSQKSPPPGSLEYLCLPAGGQVQLVPLAQAMGPGQAVEVERRPSQGAAGSPSLESGGGPAPPALGPRVGGQDQKDSPVAIPMSSGDTEDPGVASGYVSSADLVFTPNSGASSVSLVPSLGLPSDQTPSLCPGLASGPPGAPGPVKSGFEGYVELPPIEGRSPRSPRNNPVPPEAKSPVLNPGERPADVSPTSPQPEGLLVLQQVGDYCFLPGLGPGPLSLRSKPSSPGPGPEIKNLDQAFQVKKPPGQAVPQVPVIQLFKALKQQDYLSLPPWEVNKPGEVC

SEQ ID NO: 668 - protein, 415 aa, Homo sapiens [sequence omitted]

SEQ ID NO: 669 - protein, 146 aa, Homo sapiens
MAGPLRAPLLLLAILAVALAVSPAAGSSPGKPPRLVGGPMDASVEEEGVRRALDFAVGEYNKASNDMYHSRALQVVRARKQIVAGVNYFLDVELGRTTCTKTQPNLDNCPFHDQPHLKRKAFCSFQIYAVPWQGTMTLSKSTCQDA

SEQ ID NO: 670 - protein, 445 aa, Homo sapiens
MALVDKHKVKRQRLDRICEGIRPQIMNGPLHPRPLVALLDGRDCTVEMPILKDLATVAFCDAQSTQEIHEKVLNEAVGAMMYHTITLTREDLEKFKALRVIVRIGSGYDNVDIKAAGELGIAVCNIPSAAVEETADSTICHILNLYRRNTWLYQALREGTRVQSVEQIREVASGAARIRGETLGLIGFGRTGQAVAVRAKAFGFSVIFYDPYLQDGIERSLGVQRVYTLQDLLYQSDCVSLHCNLNEHNHHLINDFTIKQMRQGAFLVNAARGGLVDEKALAQALKEGRIRGAALDVHESEPFSFAQGPLKDAPNLICTPHTAWYSEQASLEMREAAATEIRRAITGRIPESLRNCVNKEFFVTSAPWSVIDQQAIHPELNGATYRYPPGIVGVAPGGLPAAMEGIIPGGIPVTHNLPTVAHPSQAPSPNQPTKHGDNREHPNEQ

SEQ ID NO: 671 - protein, 271 aa, Homo sapiens
MEHGSIITQARREDALVLTKQGLVSKSSPKKPRGRNIFKALFCCFRAQHVGQSSSSTELAAYKEEANTIAKSDLLQCLQYQFYQIPGTCLLPEVTEEDQGRICVVIDLDETLVHSSFKPINNADFIVPIEIEGTTHQVYVLKRPYVDEFLRRMGELFECVLFTASLAKYADPVTDLLDRCGVFRARLFRESCVFHQGCYVKDLSRLGRDLRKTLILDNSPASYIFHPENAVPVQSWFDDMADTELLNLIPIFEELSGAEDVYTSLGQLRAP

SEQ ID NO: 672 - protein, 776 aa, Homo sapiens
MSSTRSQNPHGLKQIGLDQIWDDLRAGIQQVYTRQSMAKSRYMELYTHVYNYCTSVHQSNQARGAGVPPSKSKKGQTPGGAQFVGLELYKRLKEFLKNYLTNLLKDGEDLMDESVLKFYTQQWEDYRFSSKVLNGICAYLNRHWVRRECDEGRKGIYEIYSLALVTWRDCLFRPLNKQVTNAVLKLIEKERNGETINTRLISGVVQSYVELGLNEDDAFAKGPTLTVYKESFESQFLADTERFYTRESTEFLQQNPVTEYMKKAEARLLEEQRRVQVYLHESTQDELARKCEQVLIEKHLEIFHTEFQNLLDADKNEDLGRMYNLVSRIQDGLGELKKLLETHIHNQGLAAIEKCGEAALNDPKMYVQTVLDVHKKYNALVMSAFNNDAGFVAALDKACGRFINNNAVTKMAQSSSKSPELLARYCDSLLKKSSKNPEEAELEDTLNQVMVVFKYIEDKDVFQKFYAKMLAKRLVHQNSASDDAEASMISKLKQACGFEYTSKLQRMFQDIGVSKDLNEQFKKHLTNSEPLDLDFSIQVLSSGSWPFQQSCTFALPSELERSYQRFTAFYASRHSGRKLTWLYQLSKGELVTNCFKNRYTLQASTFQMAILLQYNTEDAYTVQQLTDSTQIKMDILAQVLQILLKSKLLVLEDENANVDEVELKPDTLIKLYLGYKNKKLRVNINVPMKTEQKQEQETTHKNIEEDRKLLIQAAIVRIMKMRKVLKHQQLLGEVLTQLSSRFKPRVPVIKKCIDILIEKEYLERVDGEKDTYSYLA

SEQ ID NO: 673 - protein, 956 aa, Homo sapiens
MSSGLWSQEKVTSPYWEERIFYLLLQECSVTDKQTQKLLKVPKGSIGQYIQDRSVGHSRIPSAKGKKNQIGLKILEQPHAVLFVDEKDVVEINEKFTELLLAITNCEERFSLFKNRNRLSKGLQIDVGCPVKVQLRSGEEKFPGVVRFRGPLLAERTVSGIFFGVELLEEGRGQGFTDGVYQGKQLFQCDEDCGVFVALDKLELIEDDDTALESDYAGPGDTMQVELPPLEINSRVSLKVGETIESGTVIFCDVLPGKESLGYFVGVDMDNPIGNWDGRFDGVQLCSFACVESTILLHINDIIPALSESVTQERRPPKLAFMSRGVGDKGSSSHNKPKATGSTSDPGNRNRSELFYTLNGSSVDSQPQSKSKNTWYIDEVAEDPAKSLTEISTDFDRSSPPLQPPPVNSLTTENRFHSLPFSLTKMPNTNGSIGHSPLSLSAQSVMEELNTAPVQESPPLAMPPGNSHGLEVGSLAEVKENPPFYGVIRWIGQPPGLNEVLAGLELEDECAGCTDGTFRGTRYFTCALKKALFVKLKSCRPDSRFASLQPVSNQIERCNSLAFGGYLSEVVEENTPPKMEKEGLEIMIGKKKGIQGHYNSCYLDSTLFCLFAFSSVLDTVLLRPKEKNDVEYYSETQELLRTEIVNPLRIYGYVCATKIMKLRKILEKVEAASGFTSEEKDPEEFLNILFHHILRVEPLLKIRSAGQKVQDCYFYQIFMEKNEKVGVPTIQQLLEWSFINSNLKFAEAPSCLIIQMPRFGKDFKLFKKIFPSLELNITDLLEDTPRQCRICGGLAMYECRECYDDPDISAGKIKQFCKTCNTQVHLHPKRLNHKYNPVSLPKDLPDWDWRHGCIPCQNMELFAVLCIETSHYVAFVKYGKDDSAWLFFDSMADRDGGQNGFNIPQVTPCPEVGEYLKMSLEDLHSLDSRRIQGCARRLLCDAYMCMYQSPTMSLYK

SEQ ID NO: 674 - protein, 394 aa, Homo sapiens
MDLCHPEPAELSSGETEELQRIKWHRKQLLEDIQKLKDEIADVFAQIDCFESAEESRMAQKEKELCIGRKKFNMDPAKGIQYFIEHKLLTPDVQDIARFLYKGEGLNKTAIGTYLGERDPINLQVLQAFVDCHEFANLNLVQALRQFLWSFRLPGEAQKIDRMMEAFATRYCLCNPGVFQSTDTCYVLSFSIIMLNTSLHNPNVRDRPPFERFVSMNRGINNGSDLPEDQLRNLFDSIKSEPFSIPEDDGNDLTHTFFNPDREGWLLKLGGRVKTWKRRWFILTDNCLYYFEFTTDKEPRGIIPLENLSVQKVDDPKKPFCLELYNPSCRGQKIKACKTDGDGRVVEGKHESYRISATSAEERDQWIESIRASITRVPFYDLVSTRKKKIASKQ

SEQ ID NO: 675 - protein, 420 aa, Homo sapiens
METKRVEIPGSVLDDLCSRFILHIPSEERDNAIRVCFQIELAHWFYLDFYMQNTPGLPQCGIRDFAKAVFSHCPFLLPQGEDVEKVLDEWKEYKMGVPTYGAIILDETLENVLLVQGYLAKSGWGFPKGKVNKEEAPHDCAAREVFEETGFDIKDYICKDDYIELRINDQLARLYIIPGIPKDTKFNPKTRREIRNIEWFSIEKLPCHRNDMTPKSKLGLAPNKFFMAIPFIRPLRDWLSRRFGDSSDSDNGFSSTGSTPAKPTVEKLSRTKFRHSQQLFPDGSPGDQWVKHRQPLQQKPYNNHSEMSDLLKGKNQSMRGNGRKQYQDSPNQKKRTNGLQPAKQQNSLMKCEKKLHPRKLQDNFETDAVYDLPSSSEDQLLEHAEGQPVACNGHCKFPFSSRAFLSFKFDHNAIMKILDL

SEQ ID NO: 676 - protein, 1712 aa, Homo sapiens
MERNVLTTFSQEMSQLILNEMPKAEYSSLFNDFVESEFFLIDGDSLLITCICEISFKPGQNLHFFYLVERYLVDLISKGGQFTIVFFKDAEYAYFNFPELLSLRTALILHLQKNTTIDVRTTFSRCLSKEWGSFLEESYPYFLIVADEGLNDLQTQLFNFLIIHSWARKVNVVLSSGQESDVLCLYAYLLPSMYRHQIFSWKNKQNIKDAYTTLLNQLERFKLSALAPLFGSLKWNNITEEAHKTVSLLTQVWPEGSDIRRVFCVTSCSLSLRMYHRFLGNREPSSGQETEIQQVNSNCLTLQEMEDLCKLHCLTVVFLLHLPLSQRACARVITSHWAEDMKPLLQMKKWCEYFILRNIHTFEFWNLNLIHLSDLNDELLLKNIAFYYENENVKGLHLNLGDTIMKDYEYLWNTVSKLVRDFEVGQPFPLRTTKVCFLEKKPSPIKDSSNEMVPNLGFIPTSSFVVDKFAGDILKDLPFLKSDDPIVTSLVKQKEFDELVHWHSHKPLSDDYDRSRCQFDEKSRDPRVLRSVQKYHVFQRFYGNSLETVSSKIIVTQTIKSKKDFSGPKSKKAHETKAEIIARENKKRLFAREEQKEEQKWNALSFSIEEQLKENLHSGIKSLEDFLKSCKSSCVKLQVEMVGLTACLKAWKEHCRSEEGKTTKDLSIAVQVMKRIHSLMEKYSELLQEDDRQLIARCLKYLGFDELASSLHPAQDAENDVKVKKRNKYSVGIGPARFQLQYMGHYLIRDERKDPDPRVQDFIPDTWQRELLDVVDKNESAVIVAPTSSGKTYASYYCMEKVLKESDDGVVVYVAPTKALVNQVAATVQNRFTKNLPSGEVLCGVFTREYRHDALNCQVLITVPACFEILLLAPHRQNWVKKIRYVIFDEVHCLGGEIGAEIWEHLLVMIRCPFLALSATISNPEHLTEWLQSVKWYWKQEDKIIENNTASKRHVGRQAGFPKDYLQVKQSYKVRLVLYGERYNDLEKHVCSIKHGDIHFDHFHPCAALTTDHIERYGFPPDLTLSPRESIQLYDAMFQIWKSWPRAQELCPENFIHFNNKLVIKKMDARKYEESLKAELTSWIKNGNVEQARMVLQNLSPEADLSPENMITMFPLLVEKLRKMEKLPALFFLFKLGAVENAAESVSTFLKKKQETKRPPKADKEAHVMANKLRKVKKSIEKQKIIDEKSQKKTRNVDQSLIHEAEHDNLVKCLEKNLEIPQDCTYADQKAVDTETLQKVFGRVKFERKGEELKALAERGIGYHHSAMSFKEKQLVEILFRKGYLRVVTATGTLALGVNMPCKSVVFAQNSVYLDALNYRQMSGRAGRRGQDLMGDVYFFDIPFPKIGKLIKSNVPELRGHFPLSITLVLRLMLLASKGDDPEDAKAKVLSVLKHSLLSFKQPRVMDMLKLYFLFSLQFLVKEGYLDQEGNPMGFAGLVSHLHYHEPSNLVFVSFLVNGLFHDLCQPTRKGSKHFSQDVMEKLVLVLAHLFGRRYFPPKFQDAHFEFYQSKVFLDDLPEDFSDALDEYNMKIMEDFTTFLRIVSKLADMNQEYQLPLSKIKFTGKECEDSQLVSHLMSCKEGRVAISPFVCLSGNFDDDLLRLETPNHVTLGTIGVNRSQAPVLLSQKFDNRGRKMSLNAYALDFYKHGSLIGLVQDNRMNEGDAYYLLKDFALTIKSISVSLRELCENEDDNVVLAFEQLSTTFWEKLNKV

SEQ ID NO: 677 - protein, 550 aa, Homo sapiens
MVPKADSGAFLLLFLLVLTVTEPLRPELRCNPGQFACRSGTIQCIPLPWQCDGWATCEDESDEANCPEVTGEVRPHHGKEAVDPRQGRARGGDPSHFHAVNVAQPVRFSSFLGKCPTGWHHYEGTASCYRVYLSGENYWDAAQTCQRLNGSLATFSTDQELRFVLAQEWDQPERSFGWKDQRKLWVGYQYVITGRNRSLEGRWEVAFKGSSEVFLPPDPIFASAMSENDNVFCAQLQCFHFPTLRHHDLHSWHAESCYEKSSFLCKRSQTCVDIKDNVVDEGFYFTPKGDDPCLSCTCHGGEPEMCVAALCERPQGCQQYRKDPKECCKFMCLDPDGNSLFDSMASGMRLVVSCISSFLILSLLLFMVHRLRQRRRERIESLIGANLHHFNLGRRIPGFDYGPDGFGTGLTPLHLSDDGEGGTFHFHDPPPPYTAYKYPDIGQPDDPPPPYEASIHPDSVFYDPADDDAFEPVEVSLPAPGDGGSEGALLRRLEQPLPTAGASLADLEDSADSSSALLVPPDPAQSGSTPAAEALPGGGRHSRSSLNTVV

SEQ ID NO: 678 - protein, 735 aa, Homo sapiens
MAKERGLISPSDFAQLQKYMEYSTKKVSDVLKLFEDGEMAKYVQGDAIGYEGFQQFLKIYLEVDNVPRHLSLALFQSFETGHCLNETNVTKDVVCLNDVSCYFSLLEGGRPEDKLEFTFKLYDTDRNGILDSSEVDKIILQMMRVAEYLDWDVSELRPILQEMMKEIDYDGSGSVSQAEWVRAGATTVPLLVLLGLEMTLKDDGQHMWRPKRFPRPVYCNLCESSIGLGKQGLSCNLCKYTVHDQCAMKALPCEVSTYAKSRKDIGVQSHVWVRGGCESGRCDRCQKKIRIYHSLTGLHCVWCHLEIHDDCLQAVGHECDCGLLRDHILPPSSIYPSVLASGPDRKNSKTSQKTMDDLNLSTSEALRIDPVPNTHPLLVFVNPKSGGKQGQRVLWKFQYILNPRQVFNLLKDGPEIGLRLFKDVPDSRILVCGGDGTVGWILETIDKANLPVLPPVAVLPLGTGNDLARCLRWGGGYEGQNLAKILKDLEMSKVVHMDRWSVEVIPQQTEEKSDPVPFQIINNYFSIGVDASIAHRFHIMREKYPEKFNSRMKNKLWYFEFATSESIFSTCKKLEESLTVEICGKPLDLSNLSLEGIAVLNIPSMHGGSNLWGDTRRPHGDIYGINQALGATAKVITDPDILKTCVPDLSDKRLEVVGLEGAIEMGQIYTKLKNAGRRLAKCSEITFHTTKTLPMQIDGEPWMQTPCTIKITHKNQMPMLMGPPPRSTNFFGFLS

SEQ ID NO: 679 - protein, 678 aa, Homo sapiens
MELRSYQWEVIMPALEGKNIIIWLPTGAGKTRAAAYVAKRHLETVDGAKVVVLVNRVHLVTQHGEEFRRMLDGRWTVTTLSGDMGPRAGFGHLARCHDLLICTAELLQMALTSPEEEEHVELTVFSLIVVDECHHTHKDTVYNVIMSQYLELKLQRAQPLPQVLGLTASPGTGGASKLDGAINHVLQLCANLDTWCIMSPQNCCPQLQEHSQQPCKQYNLCHRRSQDPFGDLLKKLMDQIHDHLEMPELSRKFGTQMYEQQVVKLSEAAALAGLQEQRVYALHLRRYNDALLIHDTVRAVDALAALQDFYHREHVTKTQILCAERRLLALFDDRKNELAHLATHGPENPKLEMLEKILQRQFSSSNSPRGIIFTRTRQSAHSLLLWLQQQQGLQTVDIRAQLLIGAGNSSQSTHMTQRDQQEVIQKFQDGTLNLLVATSVAEEGLDIPHCNVVVRYGLLTNEISMVQARGRARADQSVYAFVATEGSRELKRELINEALETLMEQAVAAVQKMDQAEYQAKIRDLQQAALTKRAAQAAQRENQRQQFPVEHVQLLCINCMVAVGHGSDLRKVEGTHHVNVNPNFSNYYNVSRDPVVINKVFKDWKPGGVISCRNCGEVWGLQMIYKSVKLPVLKVRSMLLETPQGRIQAKKWSRVPFSVPDFDFLQHCAENLSDLSLD

SEQ ID NO: 680 - protein, 562 aa, Homo sapiens
MDDKGDPSNEEAPKAIKPTSKEFRKTWGFRRTTIAKREGAGDAEADPLEPPPPQQQLGLSLRRSGRQPKRTERVEQFLTIARRRGRRSMPVSLEDSGEPTSCPATDAETASEGSVESASETRSGPQSASTAVKERPASSEKVKGGDDHDDTSDSDSDGLTLKELQNRLRRKREQEPTERPLKGIQSRLRKKRREEGPAETVGSEASDTVEGVLPSKQEPENDQGVVSQAGKDDRESKLEGKAAQDIKDEEPGDLGRPKPECEGYDPNALYCICRQPHNNRFMICCDRCEEWFHGDCVGISEARGRLLERNGEDYICPNCTILQVQDETHSETADQQEAKWRPGDADGTDCTSIGTIEQKSSEDQGIKGRIEKAANPSGKKKLKIFQPVIEAPGASKCIGPGCCHVAQPDSVYCSNDCILKHAAATMKFLSSGKEQKPKPKEKMKMKPEKPSLPKCGAQAGIKISSVHKRPAPEKKETTVKKAVVVPARSEALGKEAACESSTPSWASDHNYNAVKPEKTAAPSPSLLYKCMYHLGVGLLDPSRSFWIAIPWACPGLGVAALC

SEQ ID NO: 681 - protein, 2068 aa, Homo sapiens
MQADKCRTSSRSVKKELVIESPLQYKDAAQGEVEAESPGPVPAKPKLIEPLDYENVIVQKKTQILNDCLREMLLFPYDDFQTAILRRQGRYICSTVPAKAEEEAQSLFVTECIKTYNSDWHLVNYKYEDYSGEFRQLPNKVVKLDKLPVHVYEVDEEVDKDEDAASLGSQKGGITKHGWLYKGNMNSAISVTMRSFKRRFFHLIQLGDGSYNLNFYKDEKISKEPKGSIFLDSCMGVVQNNKVRRFAFELKMQDKSSYLLAADSEVEMEEWITILNKILQLNFEAAMQEKRNGDSHEDDEQSKLEGSGSGLDSYLPELAKSAREAEIKLKSESRVKLFYLDPDAQKLDFSSAEPEVKSFEEKFGKRILVKCNDLSFNLQCCVAENEEGPTTNVEPFFVTLSLFDIKYNRKISADFHVDLNHFSVRQMLATTSPALMNGSGQSPSVLKGILHEAAMQYPKQGIFSVTCPHPDIFLVARIEKVLQGSITHCAEPYMKSSDSSKVAQKVLKNAKQACQRLGQYRMPFAWAARTLFKDASGNLDKNARFSAIYRQDSNKLSNDDMLKLLADFRKPEKMAKLPVILGNLDITIDNVSSDFPNYVNSSYIPTKQFETCSKTPITFEVEEFVPCIPKHTQPYTIYTNHLYVYPKYLKYDSQKSFAKARNIAICIEFKDSDEEDSQPLKCIYGRPGGPVFTRSAFAAVLHHHQNPEFYDEIKIELPTQLHEKHHLLLTFFHVSCDNSSKGSTKKRDVVETQVGYSWLPLLKDGRVVTSEQHIPVSANLPSGYLGYQELGMGRHYGPEIKWVDGGKPLLKISTHLVSTVYTQDQHLHNFFQYCQKTESGAQALGNELVKYLKSLHAMEGHVMIAFLPTILNQLFRVLTRATQEEVAVNVTRVIIHVVAQCHEEGLESHLRSYVKYAYKAEPYVASEYKTVHEELTKSMTTILKPSADFLTSNKLLKYSWFFFDVLIKSMAQHLIENSKVKLLRNQRFPASYHHAVETVVNMLMPHITQKFRDNPEASKNANHSLAVFIKRCFTFMDRGFVFKQINNYISCFAPGDPKTLFEYKFEFLRVVCNHEHYIPLNLPMPFGKGRIQRYQDLQLDYSLTDEFCRNHFLVGLLLREVGTALQEFREVRLIAISVLKNLLIKHSFDDRYASRSHQARIATLYLPLFGLLIENVQRINVRDVSPFPVNAGMTVKDESLALPAVNPLVTPQKGSTLDNSLHKDLLGAISGIASPYTTSTPNINSVRNADSRGSLISTDSGNSLPERNSEKSNSLDKHQQSSTLGNSVVRCDKLDQSEIKSLLMCFLYILKSMSDDALFTYWNKASTSELMDFFTISEVCLHQFQYMGKRYIARTGMMHARLQQLGSLDNSLTFNHSYGHSDADVLHQSLLEANIATEVCLTALDTLSLFTLAFKNQLLADHGHNPLMKKVFDVYLCFLQKHQSETALKNVFTALRSLIYKFPSTFYEGRADMCAALCYEILKCCNSKLSSIRTEASQLLYFLMRNNFDYTGKKSFVRTHLQVIISVSQLIADVVGIGGTRFQQSLSIINNCANSDRLIKHTSFSSDVKDLTKRIRTVLMATAQMKEHENDPEMLVDLQYSLAKSYASTPELRKTWLDSMARIHVKNGDLSEAAMCYVHVTALVAEYLTRKEAVQWEPPLLPHSHSACLRRSRGGVFRQGCTAFRVITPNIDEEASMMEDVGMQDVHFNEDVLMELLEQCADGLWKAERYELIADIYKLIIPIYEKRRDFERLAHLYDTLHRAYSKVTEVMHSGRRLLGTYFRVAFFGQAAQYQFTDSETDVEGFFEDEDGKEYIYKEPKLTPLSEISQRLLKLYSDKFGSENVKMIQDSGKVNPKDLDSKYAYIQVTHVIPFFDEKELQERKTEFERSHNIRRFMFEMPFTQTGKRQGGVEEQCKRRTILTAIHCFPYVKKRIPVMYQHHTDLNPIEVAIDEMSKKVAELRQLCSSAEVDMIKLQLKLQGSVSVQVNAGPLAYARAFLDDTNTKRYPDNKVKLLKEVFRQFVEACGQALAVNERLIKEDQLEYQEEMKANYREMAKELSEIMHEQLG

SEQ ID NO: 682 - protein, 496 aa, Homo sapiens
MTRGARLRSDARAQLNQLSLDGGTGSGQKGKCEEFPSSLSSVSPGLEAAALLLAVTMDPLETPIKDGILYQQHVKFGKKCWRKVWALLYAGGPSGVARLESWEVRDGGLGAAGDRSAGPGRRGERRVIRLADCVSVLPADGESCPRDTGAFLLTTTERSHLLAAQHRQAWMGPICQLAFPGTGEASSGSTDAQSPKRGLVPMEENSIYSSWQEVGEFPVVVQRTEAATRCQLKGPALLVLGPDAIQLREAKGTQALYSWPYHFLRKFGSDKGVFSFEAGRRCHSGEGLFAFSTPCAPDLCRAVAGAIARQRERLPELTRPQPCPLPRATSLPSLDTPGELREMPPGPEPPTSRKMHLAEPGPQSLPLLLGPEPNDLASGLYASVCKRASGPPGNEHLYENLCVLEASPTLHGGEPEPHEGPGSRSPTTSPIYHNGQDLSWPGPANDSTLEAQYRRLLELDQVEGTGRPDPQAGFKAKLVTLLSRERRKGPAPCDRP

SEQ ID NO: 683 - protein, 486 aa, Homo sapiens
MQPSGLEGPGTFGRWPLLSLLLLLLLLQPVTCAYTTPGPPRALTTLGAPRAHTMPGTYAPSTTLSSPSTQGLQEQARALMRDFPLVDGHNDLPLVLRQVYQKGLQDVNLRNFSYGQTSLDRLRDGLVGAQFWSAYVPCQTQDRDALRLTLEQIDLIRRMCASYSELELVTSAKALNDTQKLACLIGVEGGHSLDNSLSILRTFYMLGVRYLTLTHTCNTPWAESSAKGVHSFYNNISGLTDFGEKVVAEMNRLGMMVDLSHVSDAVARRALEVSQAPVIFSHSAARGVCNSARNVPDDILQLLKKNGGVVMVSLSMGVIQCNPSANVSTVADHFDHIKAVIGSKFIGIGGDYDGAGKFPQGLEDVSTYPVLIEELLSRGWSEEELQGVLRGNLLRVFRQVEKVQEENKWQSPLEDKFPDEQLSSSCHSDLSRLRQRQSLTSGQELTEIPIHWTAKLPAKWSVSESSPHMAPVLAVVATFPVLILWL

SEQ ID NO: 684 - protein, 391 aa, Homo sapiens
MAAVVENVVKLLGEQYYKDAMEQCHNYNARLCAERSVRLPFLDSQTGVAQSNCYIWMEKRHRGPGLASGQLYSYPARRWRKKRRAHPPEDPRLSFPSIKPDTDQTLKKEGLISQDGSSLEALLRTDPLEKRGAPDPRVDDDSLGEFPVTNSRARKRILEPDDFLDDLDDEDYEEDTPKRRGKGKSKGKGVGSARKKLDASILEDRDKPYACDICGKRYKNRPGLSYHYAHSHLAEEEGEDKEDSQPPTPVSQRSEEQKSKKGPDGLALPNNYCDFCLGDSKINKKTGQPEELVSCSDCGRSGHPSCLQFTPVMMAAVKTYRWQCIECKCCNICGTSENDDQLLFCDDCDRGYHMYCLTPSMSEPPEGSWSCHLCLDLLKEKASIYQNQNSS

SEQ ID NO: 685 - protein, 551 aa, Homo sapiens
MAGDLSAGFFMEELNTYRQKQGVVLKYQELPNSGPPHDRRFTFQVIIDGREFPEGEGRSKKEAKNAAAKLAVEILNKEKKAVSPLLLTTTNSSEGLSMGNYIGLINRIAQKKRLTVNYEQCASGVHGPEGFHYKCKMGQKEYSIGTGSTKQEAKQLAAKLAYLQILSEETSVKSDYLSSGSFATTCESQSNSLVTSTLASESSSEGDFSADTSEINSNSDSLNSSSLLMNGLRNNQRKAKRSLAPRFDLPDMKETKYTVDKRFGMDFKEIELIGSGGFGQVFKAKHRIDGKTYVIKRVKYNNEKAEREVKALAKLDHVNIVHYNGCWDGFDYDPETSDDSLESSDYDPENSKNSSRSKTKCLFIQMEFCDKGTLEQWIEKRRGEKLDKVLALELFEQITKGVDYIHSKKLIHRDLKPSNIFLVDTKQVKIGDFGLVTSLKNDGKRTRSKGTLRYMSPEQISSQDYGKEVDLYALGLILAELLHVCDTAFETSKFFTDLRDGIISDIFDKKEKTLLQKLLSKKPEDRPNTSEILRTLTVWKKSPEKNERHTC

SEQ ID NO: 686 - protein, 352 aa, Homo sapiens
MASRKEGTGSTATSSSSTAGAAGKGKGKGGSGDSAVKQVQIDGLVVLKIIKHYQEEGQGTEVVQGVLLGLVVEDRLEITNCFPFPQHTEDDADFDEVQYQMEMMRSLRHVNIDHLHVGWYQSTYYGSFVTRALLDSQFSYQHAIEESVVLIYDPIKTAQGSLSLKAYRLTPKLMEVCKEKDFSPEALKKANITFEYMFEEVPIVIKNSHLINVLMWELEKKSAVADKHELLSLASSNHLGKNLQLLMDRVDEMSQDIVKYNTYMRNTSKQQQQKHQYQQRRQQENMQRQSRGEPPLPEEDLSKLFKPPQPPARMDSLLIAGQINTYCQNIKEFTAQNLGKLFMAQALQEYNN

SEQ ID NO: 687 - protein, 823 aa, Homo sapiens
MGGRVFLVFLAFCVWLTLPGAETQDSRGCARWCPQDSSCVNATACRCNPGFSSFSEIITTPMETCDDINECATLSKVSCGKFSDCWNTEGSYDCVCSPGYEPVSGAKTFKNESENTCQDVDECQQNPRLCKSYGTCVNTLGSYTCQCLPGFKLKPEDPKLCTDVNECTSGQNPCHSSTHCLNNVGSYQCRCRPGWQPIPGSPNGPNNTVCEDVDECSSGQHQCDSSTVCFNTVGSYSCRCRPGWKPRHGIPNNQKDTVCEDMTFSTWTPPPGVHSQTLSRFFDKVQDLGRDYKPGLANNTIQSILQALDELLEAPGDLETLPRLQQHCVASHLLDGLEDVLRGLSKNLSNGLLNFSYPAGTELSLEVQKQVDRSVTLRQNQAVMQLDWNQAQKSGDPGPSVVGLVSIPGMGKLLAEAPLVLEPEKQMLLHETHQGLLQDGSPILLSDVISAFLSNNDTQNLSSPVTFTFSHRSVIPRQKVLCVFWEHGQNGCGHWATTGCSTIGTRDTSTICRCTHLSSFAVLMAHYDVQEEDPVLTVITYMGLSVSLLCLLLAALTFLLCKAIQNTSTSLHLQLSLCLFLAHLLFLVAIDQTGHKVLCSIIAGTLHYLYLATLTWMLLEALYLFLTARNLTVVNYSSINRFMKKLMFPVGYGVPAVTVAISAASRPHLYGTPSRCWLQPEKGFIWGFLGPVCAIFSVNLVLFLVTLWILKNRLSSLNSEVSTLRNTRMLAFKATAQLFILGCTWCLGILQVGPAARVMAYLFTIINSLQGVFIFLVYCLLSQQVREQYGKWSKGIRKLKTESEMHTLSSSAKADTSKPSTVN

SEQ ID NO: 688 - protein, 1371 aa, Homo sapiens
MTTKRSLFVRLVPCRCLRGEEETVTTLDYSHCSLEQVPKEIFTFEKTLEELYLDANQIEELPKQLFNCQSLHKLSLPDNDLTTLPASIANLINLRELDVSKNGIQEFPENIKNCKVLTIVEASVNPISKLPDGFSQLLNLTQLYLNDAFLEFLPANFGRLTKLQILELRENQLKMLPKTMNRLTQLERLDLGSNEFTEVPEVLEQLSGLKEFWMDANRLTFIPGFIGSLKQLTYLDVSKNNIEMVEEGISTCENLQDLLLSSNSLQQLPETIGSLKNITTLKIDENQLMYLPDSIGGLISVEELDCSFNEVEALPSSIGQLTNLRTFAADHNYLQQLPPEIGSWKNITVLFLHSNKLETLPEEMGDMQKLKVINLSDNRLKNLPFSFTKLQQLTAMWLSDNQSKPLIPLQKETDSETQKMVLTNYMFPQQPRTEDVMFISDNESFNPSLWEEQRKQRAQVAFECDEDKDEREAPPREGNLKRYPTPYPDELKNMVKTVQTIVHRLKDEETNEDSGRDLKPHEDQQDINKDVGVKTSESTTTVKSKVDEREKYMIGNSVQKISEPEAEISPGSLPVTANMKASENLKHIVNHDDVFEESEELSSDEEMKMAEMRPPLIETSINQPKVVALSNNKKDDTKETDSLSDEVTHNSNQNNSNCSSPSRMSDSVSLNTDSSQDTSLCSPVKQTHIDINSKIRQEDENFNSLLQNGDILNSSTEEKFKAHDKKDFNLPEYDLNVEERLVLIEKSVDSTATADDTHKLDHINMNLNKLITNDTFQPEIMERSKTQDIVLGTSFLSINSKEETEHLENGNKYPNLESVNKVNGHSEETSQSPNRTEPHDSDCSVDLGISKSTEDLSPQKSGPVGSVVKSHSITNMEIGGLKIYDILSDNGPQQPSTTVKITSAVDGKNIVRSKSATLLYDQPLQVFTGSSSSSDLISGTKAIFKFDSNHNPEEPNIIRGPTSGPQSAPQIYGPPQYNIQYSSSAAVKDTLWHSKQNPQIDHASFPPQLLPRSESTENQSYAKHSANMNFSNHNNVRANTAYHLHQRLGPARHGEMWAISPNDRLIPAVTRSTIQRQSSVSSTASVNLGDPGSTRRAQIPEGDYLSYREFHSAGRTPPMMPGSQRPLSARTYSIDGPNASRPQSARPSINEIPERTMSVSDFNYSRTSPSKRPNARVGSEHSLLDPPGKSKVPRDWREQVLRHIEAKKLEKMPLSNGQMGQPLRPQANYSQIHHPPQASVARHPSREQLIDYLMLKVAHQPPYTQPHCSPRQGHELAKQEIRVRVEKDPELGFSISGGVGGRGNPFRPDDDGIFVTRVQPEGPASKLLQPGDKIIQANGYSFINIEHGQAVSLLKTFQNTVELIIVREVSS

SEQ ID NO: 689 - protein, 469 aa, Homo sapiens
MNDFGIKNMDQVAPVANSYRGTLKRQPAFDTFDGSLFAVFPSLNEEQTLQEVPTGLDSISHDSANCELPLLTPCSKAVMSQALKATFSGFKKEQRRLGIPKNPWLWSEQQVCQWLLWATNEFSLVNVNLQRFGMNGQMLCNLGKERFLELAPDFVGDILWEHLEQMIKENQEKTEDQYEENSHLTSVPHWINSNTLGFGTEQAPYGMQTQNYPKGGLLDSMCPASTPSVLSSEQEFQMFPKSRLSSVSVTYCSVSQDFPGSNLNLLTNNSGTPKDHDSPENGADSFESSDSLLQSWNSQSSLLDVQRVPSFESFEDDCSQSLCLNKPTMSFKDYIQERSDPVEQGKPVIPAAVLAGFTGSGPIQLWQFLLELLSDKSCQSFISWTGDGWEFKLADPDEVARRWGKRKNKPKMNYEKLSRGLRYYYDKNIIHKTSGKRYVYRFVCDLQNLLGFTPEELHAILGVQPDTED

SEQ ID NO: 690 - protein, 390 aa, Homo sapiens
MDFWLWPLYFLPVSGALRILPEVKVEGELGGSVTIKCPLPEMHVRIYLCREMAGSGTCGTVVSTTNFIKAEYKGRVTLKQYPRKNLFLVEVTQLTESDSGVYACGAGMNTDRGKTQKVTLNVHSEYEPSWEEQPMPETPKWFHLPYLFQMPAYASSSKFVTRVTTPAQRGKVPPVHHSSPTTQITHRPRVSRASSVAGDKPRTFLPSTTASKISALEGLLKPQTPSYNHHTRLHRQRALDYGSQSGREGQGFHILIPTILGLFLLALLGLVVKRAVERRKALSRRARRLAVRMRALESSQRPRGSPRPRSQNNIYSACPRRARGADAAGTGEAPVPGPGAPLPPAPLQVSESPWLHAPSLKTSCEYVSLYHQPAAMMEDSDSDDYINVPA

SEQ ID NO: 691 - protein, 543 aa, Homo sapiens
MASGGGGGNTGAGGGPGMGLSLGLGLGLSLGMSEATSEAEEEAATAEAVGRLATTLWLRLRGWEAVLAAAQRLLVWEKPLHSLVTAAALNGLFWLLSSSSLRPFFLLSVSLLAYFLLDLWQPRFLPDVSASSPEEPHSDSEGAGSGARPHLLSVPELCRYLAESWLTFQIHLQELLQYKRQNPAQFCVRVCSGCAVLAVLGHYVPGIMISYIVLLSILLWPLVVYHELIQRMYTRLEPLLMQLDYSMKAEANALHHKHDKRKRQGKNAPPGGDEPLAETESESEAELAGFSPVVDVKKTALALAITDSELSDEEASILESGGFSVSRATTPQLTDVSEDLDQQSLPSEPEETLSRDLGEGEEGELAPPEDLLGRPQALSRQALDSEEEEEDVAAKETLLRLSSPLHFVNTHFNGAGSPPDGVKCSPGGPVETLSPETVSGGLTALPGTLSPPLCLVGSDPAPSPSILPPVPQDSPQPLPAPEEEEALTTEDFELLDQGELEQLNAELGLEPETPPKPPDAPPLGPDIHSLVQSDQEAQAVAEP

SEQ ID NO: 692 - protein, 1068 aa, Homo sapiens
MLVGSQSFSPGGPNGIIRSQSFAGFSGLQERRSRCNSFIENSSALKKPQAKLKKMHNLGHKNNNPPKEPQPKRVEEVYRALKNGLDEYLEVHQTELDKLTAQLKDMKRNSRLGVLYDLDKQIKTIERYMRRLEFHISKVDELYEAYCIQRRLQDGASKMKQAFATSPASKAARESLTEINRSFKEYTENMCTIEVELENLLGEFSIKMKGLAGFARLCPGDQYEIFMKYGRQRWKLKGKIEVNGKQSWDGEETVFLPLIVGFISIKVTELKGLATHILVGSVTCETKELFAARPQVVAVDINDLGTIKLNLEITWYPFDVEDMTASSGAGNKAAALQRRMSMYSQGTPETPTFKDHSFFRWLHPSPDKPRRLSVLSALQDTFFAKLHRSRSFSDLPSLRPSPKAVLELYSNLPDDIFENGKAAEEKMPLSLSFSDLPNGDCALTSHSTGSPSNSTNPEITITPAEFNLSSLASQNEGMDDTSSASSRNSLGEGQEPKSHLKEEDPEEPRKPASAPSEACRRQSSGAGAEHLFLENDVAEALLQESEEASELKPVELDTSEGNITKQLVKRLTSAEVPMATDRLLSEGSVGGESEGCRSFLDGSLEDAFNGLLLALEPHKEQYKEFQDLNQEVMNLDDILKCKPAVSRSRSSSLSLTVESALESFDFLNTSDFDEEEDGDEVCNVGGGADSVFSDTETEKHSYRSVHPEARGHLSEALTEDTGVGTSVAGSPLPLTTGNESLDITIVRHLQYCTQLVQQIVFSSKTPFVARSLLEKLSRQIQVMEKLAAVSDENIGNISSVVEAIPEFHKKLSLLSFWTKCCSPVGVYHSPADRVMKQLEASFARTVNKEYPGLADPVFRTLVSQILDRAEPLLSSSLSSEVVTVFQYYSYFTSHGVSDLESYLSQLARQVSMVQTLQSLRDEKLLQTMSDLAPSNLLAQQEVLRTLALLLTREDNEVSEAVTLYLAAASKNQHFREKALLYYCEALTKTNLQLQKAACLALKILEATESIKMLVTLCQSDTEEIRNVASETLLSLGEDGRLAYEQLDKFPRDCVKVGGRHGTEVATAF

SEQ ID NO: 693 - protein, 843 aa, Homo sapiens
MVAEESGPGAQNSPYQLRRKTLLPKRTACPTKNSMEGASTSTTENFGHRAKRARVSGKSQDLSAAPAEQYLQEKLPDEVVLKIFSYLLEQDLCRAACVCKRFSELANDPILWKRLYMEVFEYTRPMMHPEPGKFYQINPEEYEHPNPWKESFQQLYKGAHVKPGFAEHFYSNPARYKGRENMLYYDTIEDALGGVQEAHFDGLIFVHSGIYTDEWIYIESPITMIGAAPGKVADKVIIENTRDSTFVFMEGSEDAYVGYMTIRFNPDDKSAQHHNAHHCLEITVNCSPIIDHCIIRSTCTVGSAVCVSGQGACPTIKHCNISDCENVGLYITDHAQGIYEDNEISNNALAGIWVKNHGNPIIRRNHIHHGRDVGVFTFDHGMGYFESCNIHRNRIAGFEVKAYANPTVVRCEIHHGQTGGIYVHEKGRGQFIENKIYANNFAGVWITSNSDPTIRGNSIFNGNQGGVYIFGDGRGLIEGNDIYGNALAGIQIRTNSCPIVRHNKIHDGQHGGIYVHEKGQGVIEENEVYSNTLAGVWVTTGSTPVLRRNRIHSGKQVGVYFYDNGHGVLEDNDIYNHMYSGVQIRTGSNPKIRRNKIWGGQNGGILVYNSGLGCIEDNEIFDNAMAGVWIKTDSNPTLRRNKIHDGRDGGICIFNGGRGLLEENDIFRNAQAGVLISTNSHPILRKNRIFDGFAAGIEITNHATATLEGNQIFNNRFGGLFLASGVNVTMKDNKIMNNQDAIEKAVSRGQCLYKISSYTSYPMHDFYRCHTCNTTDRNAICVNCIKKCHQGHDVEFIRHDRFFCDCGAGTLSNPCTLAGEPTHDTDTLYDSAPPIESNTLQHN

SEQ ID NO: 694 - protein, 447 aa, Homo sapiens
MPDIIWVFPPQAEAEEDCHSDTVRADDDEENESPAETDLQAQLQMFRAQWMFELAPGVSSSNLENRPCRAARGSLQKTSADTKGKQEQAKEEKARELFLKAVEEEQNGALYEAIKFYRRAMQLVPDIEFKITYTRSPDGDGVGNSYIEDNDDDSKMADLLSYFQQQLTFQESVLKLCQPELESSQIHISVLPMEVLMYIFRWVVSSDLDLRSLEQLSLVCRGFYICARDPEIWRLACLKVWGRSCIKLVPYTSWREMFLERPRVRFDGVYISKTTYIRQGEQSLDGFYRAWHQVEYYRYIRFFPDGHVMMLTTPEEPQSIVPRLRTRNTRTDAILLGHYRLSQDTDNQTKVFAVITKKKEEKPLDYKYRYFRRVPVQEADQSFHVGLQLCSSGHQRFNKLIWIHHSCHITYKSTGETAVSAFEIDKMYTPLFFARVRSYTAFSERPL

SEQ ID NO: 695 - protein, 365 aa, Homo sapiens
MGVPRPQPWALGLLLFLLPGSLGAESHLSLLYHLTAVSSPAPGTPAFWVSGWLGPQQYLSYNSLRGEAEPCGAWVWENQVSWYWEKETTDLRIKEKLFLEAFKALGGKGPYTLQGLLGCELGPDNTSVPTAKFALNGEEFMNFDLKQGTWGGDWPEALAISQRWQQQDKAANKELTFLLFSCPHRLREHLERGRGNLEWKEPPSMRLKARPSSPGFSVLTCSAFSFYPPELQLRFLRNGLAAGTGQGDFGPNSDGSFHASSSLTVKSGDEHHYCCIVQHAGLAQPLRVELESPAKSSVLVVGIVIGVLLLTAAAVGGALLWRRMRSGLPAPWISLRGDDTGVLLPTPGEAQDADLKDVNVIPATA

SEQ ID NO: 696 - protein, 822 aa, Homo sapiens
MGFSSELCSPQGHGVLQQMQEAELRLLEGMRKWMAQRVKSDREYAGLLHHMSLQDSGGQSRAISPDSPISQSWAEITSQTEGLSRLLRQHAEDLNSGPLSKLSLLIRERQQLRKTYSEQWQQLQQELTKTHSQDIEKLKSQYRALARDSAQAKRKYQEASKDKDRDKAKDKYVRSLWKLFAHHNRYVLGVRAAQLHHQHHHQLLLPGLLRSLQDLHEEMACILKEILQEYLEISSLVQDEVVAIHREMAAAAARIQPEAEYQGFLRQYGSAPDVPPCVTFDESLLEEGEPLEPGELQLNELTVESVQHTLTSVTDELAVATEMVFRRQEMVTQLQQELRNEEENTHPRERVQLLGKRQVLQEALQGLQVALCSQAKLQAQQELLQTKLEHLGPGEPPPVLLLQDDRHSTSSSEQEREGGRTPTLEILKSHISGIFRPKFSLPPPLQLIPEVQKPLHEQLWYHGAIPRAEVAELLVHSGDFLVRESQGKQEYVLSVLWDGLPRHFIIQSLDNLYRLEGEGFPSIPLLIDHLLSTQQPLTKKSGVVLHRAVPKDKWVLNHEDLVLGEQIGRGNFGEVFSGRLRADNTLVAVKSCRETLPPDLKAKFLQEARILKQYSHPNIVRLIGVCTQKQPIYIVMELVQGGDFLTFLRTEGARLRVKTLLQMVGDAAAGMEYLESKCCIHRDLAARNCLVTEKNVLKISDFGMSREEADGVYAASGGLRQVPVKWTAPEALNYGRYSSESDVWSFGILLWETFSLGASPYPNLSNQQTREFVEKGGRLPCPELCPDAVFRLMEQCWAYEPGQRPSFSTIYQELQSIRKRHR

SEQ ID NO: 697 - protein, 529 aa, Homo sapiens
MGCVFCKKLEPVATAKEDAGLEGDFRSYGAADHYGPDPTKARPASSFAHIPNYSNFSSQAINPGFLDSGTIRGVSGIGVTLFIALYDYEARTEDDLTFTKGEKFHILNNTEGDWWEARSLSSGKTGCIPSNYVAPVDSIQAEEWYFGKIGRKDAERQLLSPGNPQGAFLIRESETTKGAYSLSIRDWDQTRGDHVKHYKIRKLDMGGYYITTRVQFNSVQELVQHYMEVNDGLCNLLIAPCTIMKPQTLGLAKDAWEISRSSITLERRLGTGCFGDVWLGTWNGSTKVAVKTLKPGTMSPKAFLEEAQVMKLLRHDKLVQLYAVVSEEPIYIVTEFMCHGSLLDFLKNPEGQDLRLPQLVDMAAQVAEGMAYMERMNYIHRDLRAANILVGERLACKIADFGLARLIKDDEYNPCQGSKFPIKWTAPEAALFGRFTIKSDVWSFGILLTELITKGRIPYPGMNKREVLEQVEQGYHMPCPPGCPASLYEAMEQTWRLDPEERPTFEYLQSFLEDYFTSAEPQYQPGDQT

SEQ ID NO: 698 - protein, 428 aa, Homo sapiens
MGNCHTVGPNEALVVSGGCCGSDYKQYVFGGWAWAWWCISDTQRISLEIMTLQPRCEDVETAEGVALTVTGVAQVKIMTEKELLAVACEQFLGKNVQDIKNVVLQTLEGHLRSILGTLTVEQIYQDRDQFAKLVREVAAPDVGRMGIEILSFTIKDVYDKVDYLSSLGKTQTAVVQRDADIGVAEAERDAGIREAECKKEMLDVKFMADTKIADSKRAFELQKSAFSEEVNIKTAEAQLAYELQGAREQQKIRQEEIEIEVVQRKKQIAVEAQEILRTDKELIATVRRPAEAEAHRIQQIAEGEKVKQVLLAQAEAEKIRKIGEAEAAVIEAMGKAEAERMKLKAEAYQKYGDAAKMALVLEALPQIAAKIAAPLTKVDEIVVLSGDNSKVTSEVNRLLAELPASVHALTGVDLSKIPLIKKATGVQV

SEQ ID NO: 699 - protein, 617 aa, Homo sapiens
MSWGTELWDQFDNLEKHTQWGIDILEKYIKFVKERTEIELSYAKQLRNLSKKYQPKKNSKEEEEYKYTSCKAFISNLNEMNDYAGQHEVISENMASQIIVDLARYVQELKQERKSNFHDGRKAQQHIETCWKQLESSKRRFERDCKEADRAQQYFEKMDADINVTKADVEKARQQAQIRHQMAEDSKADYSSILQKFNHEQHEYYHTHIPNIFQKIQEMEERRIVRMGESMKTYAEVDRQVIPIIGKCLDGIVKAAESIDQKNDSQLVIEAYKSGFEPPGDIEFEDYTQPMKRTVSDNSLSNSRGEGKPDLKFGGKSKGKLWPFIKKNKLMSLLTSPHQPPPPPPASASPSAVPNGPQSPKQQKEPLSHRFNEFMTSKPKIHCFRSLKRGLSLKLGATPEDFSNLPPEQRRKKLQQKVDELNKEIQKEMDQRDAITKMKDVYLKNPQMGDPASLDHKLAEVSQNIEKLRVETQKFEAWLAEVEGRLPARSEQARRQSGLYDSQNPPTVNNCAQDRESPDGSYTEEQSQESEMKVLATDFDDEFDDEEPLPAIGTCKALYTFEGQNEGTISVVEGETLYVIEEDKGDGWTRIRRNEDEEGYVPTSYVEVCLDKNAKDS

SEQ ID NO: 700 - protein, 574 aa, Homo sapiens
MASDLESSLTSIDWLPQLTLRATIEKLGSASQAGPPGSSRKCSPGSPTDPNATLSKDEAAVHQDGKPRYSYATLITYAINSSPAKKMTLSEIYRWICDNFPYYKNAGIGWKNSIRHNLSLNKCFRKVPRPRDDPGKGSYWTIDTCPDISRKRRHPPDDDLSQDSPEQEASKSPRGGVAGSGEASLPPEGNPQMSLQSPTSIASYSQGTGSVDGGAVAAGASGRESAEGPPPLYNTNHDFKFSYSEINFQDLSWSFRNLYKSMLEKSSSSSQHGFSSLLGDIPPSNNYYMYQQQQPPPPQQQQQQQQPPQPPPQQSQPQQQQAPAQGPSAVGGAPPLHTPSTDGCTPPGGKQAGAEGYGPPPVMAMHPPPLQHGGYHPHQHHPHSHPAQQPPPPQPQAQGQAPINNTGFAFPSDWCSNIDSLKESFKMVNRLNWSSIEQSQFSELMESLRQAEQKNWTLDQHHIANLCDSLNHFLTQTGHVPPQGGTHRPPAPARIADSCALTSGKQESAMSQVNSYGHPQAPHLYPGPSPMYPIPTQDSAGYNRPAHHMVPRPSVPPPGANEEIPDDFDWDLIT

SEQ ID NO: 701 - protein, 655 aa, Homo sapiens
MAEAPQVVEIDPDFEPLPRPRSCTWPLPRPEFSQSNSATSSPAPSGSAAANPDAAAGLPSASAAAVSADFMSNLSLLEESEDFPQAPGSVAAAVAAAAAAAATGGLCGDFQGPEAGCLHPAPPQPPPPGPLSQHPPVPPAAAGPLAGQPRKSSSSRRNAWGNLSYADLITKAIESSAEKRLTLSQIYEWMVKSVPYFKDKGDSNSSAGWKNSIRHNLSLHSKFIRVQNEGTGKSSWWMLNPEGGKSGKSPRRRAASMDNNSKFAKSRSRAAKKKASLQSGQEGAGDSPGSQFSKWPASPGSHSNDDFDNWSTFRPRTSSNASTISGRLSPIMTEQDDLGEGDVHSMVYPPSAAKMASTLPSLSEISNPENMENLLDNLNLLSSPTSLTVSTQSSPGTMMQQTPCYSFAPPNTSLNSPSPNYQKYTYGQSSMSPLPQMPIQTLQDNKSSYGGMSQYNCAPGLLKELLTSDSPPHNDIMTPVDPGVAQPNSRVLGQNVMMGPNSVMSTYGSQASHNKMMNPSSHTHPGHAQQTSAVNGRPLPHTVSTMPHTSGMNRLTQVKTPVQVPLPHPMQMSALGGYSSVSSCNGYGRMGLLHQEKLPSDLDGMFIERLDCDMESIIRNDLMDGDTLDFNFDNVLPNQSFPHSVKTTTHSWVSG

SEQ ID NO: 702 - protein, 673 aa, Homo sapiens
MAEAPASPAPLSPLEVELDPEFEPQSRPRSCTWPLQRPELQASPAKPSGETAADSMIPEEEDDEDDEDGGGRAGSAMAIGGGGGSGTLGSGLLLEDSARVLAPGGQDPGSGPATAAGGLSGGTQALLQPQQPLPPPQPGAAGGSGQPRKCSSRRNAWGNLSYADLITRAIESSPDKRLTLSQIYEWMVRCVPYFKDKGDSNSSAGWKNSIRHNLSLHSRFMRVQNEGTGKSSWWIINPDGGKSGKAPRRRAVSMDNSNKYTKSRGRAAKKKAALQTAPESADDSPSQLSKWPGSPTSRSSDELDAWTDFRSRTNSNASTVSGRLSPIMASTELDEVQDDDAPLSPMLYSSSASLSPSVSKPCTVELPRLTDMAGTMNLNDGLTENLMDDLLDNITLPPSQPSPTGGLMQRSSSFPYTTKGSGLGSPTSSFNSTVFGPSSLNSLRQSPMQTIQENKPATFSSMSHYGNQTLQDLLTSDSLSHSDVMMTQSDPLMSQASTAVSAQNSRRNVMLRNDPMMSFAAQPNQGSLVNQNLLHHQHQTQGALGGSRALSNSVSNMGLSESSSLGSAKHQQQSPVSQSMQTLSDSLSGSSLYSTSANLPVMGHEKFPSDLDLDMFNGSLECDMESIIRSELMDADGLDFNFDSLISTQNVVGLNVGNFTGAKQASSQSWVPG

SEQ ID NO: 703 - protein, 3013 aa, Homo sapiens
MASQQDSGFFEISIKYLLKSWSNTSPVGNGYIKPPVPPASGTHREKGPPTMLPINVDPDSKPGEYVLKSLFVNFTTQAERKIRIIMAEPLEKPLTKSLQRGEDPQFDQVISSMSSLSEYCLPSILRTLFDWYKRQNGIEDESHEYRPRTSNKSKSDEQQRDYLMERRDLAIDFIFSLVLIEVLKQIPLHPVIDSLIHDVINLAFKHFKYKEGYLGPNTGNMHIVADLYAEVIGVLAQAKFPAVKKKFMAELKELRHKEQNPYVVQSIISLIMGMKFFRIKMYPVEDFEASLQFMQECAHYFLEVKDKDIKHALAGLFVEILVPVAAAVKNEVNVPCLRNFVESLYDTTLELSSRKKHSLALYPLVTCLLCVSQKQLFLNRWHIFLNNCLSNLKNKDPKMARVALESLYRLLWVYMIRIKCESNTATQSRLITIITTLFPKGSRGVVPRDMPLNIFVKIIQFIAQERLDFAMKEIIFDFLCVGKPAKAFSLNPERMNIGLRAFLVIADSLQQKDGEPPMPVTGAVLPSGNTLRVKKTYLSKTLTEEEAKMIGMSLYYSQVRKAVDNILRHLDKEVGRCMMLTNVQMLNKEPEDMITGERKPKIDLFRTCVAAIPRLLPDGMSKLELIDLLARLSIHMDDELRHIAQNSLQGLLVDFSDWREDVLFGFTNFLLREVNDMHHTLLDSSLKLLLQLLTQWKLVIQTQGKVYEQANKIRNSELIANGSSHRIQSERGPHCSVLHAVEGFALVLLCSFQVATRKLSVLILKEIRALFIALGQPEDDDRPMIDVMDQLSSSILESFIHVAVSDSATLPLTHNVDLQWLVEWNAVLVNSHYDVKSPSHVWIFAQSVKDPWVLCLFSFLRQENLPKHCPTALSYAWPYAFTRLQSVMPLVDPNSPINAKKTSTAGSGDNYVTLWRNYLILCFGVAKPSIMSPGHLRASTPEIMATTPDGTVSYDNKAIGTPSVGVLLKQLVPLMRLESIEITESLVLGFGRTNSLVFRELVEELHPLMKEALERRPENKKRRERRDLLRLQLLRIFELLADAGVISDSTNGALERDTLALGALFLEYVDLTRMLLEAENDKEVEILKDIRAHFSAMVANLIQCVPVHHRRFLFPQQSLRHHLFILFSQWAGPFSIMFTPLDRYSDRNHQITRYQYCALKAMSAVLCCGPVFDNVGLSPDGYLYKWLDNILACQDLRVHQLGCEVVVLLLELNPDQINLFNWAIDRCYTGSYQLASGCFKAIATVCGSRNYPFDIVTLLNLVLFKASDTNREIYEISMQLMQILEAKLFVYSKKVAEQRPGSILYGTHGPLPPLYSVSLALLSCELARMYPELTLPLFSEVSQRFPTTHPNGRQIMLTYLLPWLHNIELVDSRLLLPGSSPSSPEDEVKDREGDVTASHGLRGNGWGSPEATSLVLNNLMYMTAKYGDEVPGPEMENAWNALANNEKWSNNLRITLQFLISLCGVSSDTVLLPYIKKVAIYLCRNNTIQTMEELLFELQQTEPVNPIVQHCDNPPFYRFTASSKASAAASGTTSSSNTVVAGQENFPDAEENKILKESDERFSNVIRAHTRLESRYSNSSGGSYDEDKNDPISPYTGWLLTITETKQPQPLPMPCTGGCWAPLVDYLPETITPRGPLHRCNIAVIFMTEMVVDHSVREDWALHLPLLLHAVFLGLDHYRPEVFEHSKKLLLHLLIALSCNSNFHSIASVLLQTREMGEAKTLTVQPAYQPEYLYTGGFDFLREDQSSPVPDSGLSSSSTSSSISLGGSSGNLPQMTQEVEDVDTAAETDEKANKLIEFLTTRAFGPLWCHEDITPKNQNSKSAEQLTNFLRHVVSVFKDSKSGFHLEHQLSEVALQTALASSSRHYAGRSFQIFRALKQPLSAHALSDLLSRLVEVIGEHGDEIQGYVMEALLTLEAAVDNLSDCLKNSDLLTVLSRSSSPDLSSSSKLTASRKSTGQLNMNPGTTSGNTATAERSRHQRSFSVPKKFGVIDRSSDPPRSATLDRIQACTQQGLSSKTRSSSSLKDSLTDPSHINHPTNLLATIFWVTVALMESDFEFEYLMALRLLSRLLAHMPLDKAENREKLEKLQAQLKWADFSGLQQLLLKGFTSLTTTDLTLQLFSLLTPVSKISMVDASHAIGFPLNVLCLLPQLIQHFENPNQFCKDIAERIAQVCLEEKNPKLSNLAHVMTLYKTHSYTRDCATWVNVVCRYLHEAYADITLNMVTYLAELLEKGLPSVQQPLLQVIYSLLSYMDLSVVPVKQFNVEVLKTIEKYVQSVHWREALNILKLVVSRSASLVLPSYQHSDLSKIEIHRVWTSASKELPGKTLDFHFDISETPIIGRRYDELQNSSGRDGKPRAMAVTRSTSSTSSGSNSNVLVPVSWKRPQYSQKRTKEKLVHVLSLCGQEVGLSKNPSVIFSSCGDLDLLEHQTSLVSSEDGAREQENMDDTNSEQQFRVFRDFDFLDVELEDGEGESMDNFNWGVRRRSLDSLDKCDMQILEERQLSGSTPSLNKMHHEDSDESSEEEDLTASQILEHSDLIMTLSPSEETNPMELLTTACDSTPAEPHSFNTRMSSFDASLPDMNNLQISEGSKAEAVREEEDTTVHEDDLSSSINELPAAFECSDSFSLDMTEGEEKGNRALDQFTLASFGEGDRGVSPPPSPFFSAILAAFQPAACDDAEEAWRSHINQLMCDSDGSCAVYTFHVFSSLFKNIQKRFCFLTCDAASYLGDNLRGIGSKFVSSSQMLTSCSECPTLFVDAETLLSCGLLDKLKFSVLELQEYLDTYNNRKEATLSWLANCKATFAGGSRDGVITCQPGDSEEKQLELCQRLYKLHFQLLLLFQSYCKLIGQVHEVSSMPELLNMSRELSDLKKHLKEASAVIAADPLYSDGAWSEPTFTSTEAAIQSMLECLKNNELGKALRQIRECRSLWPNDIFGSSSDDEVQTLLNIYFRHQTLGQTGTYALVGSNQSLTEICTKLMELNMEIRDMIRRAQSYRVLTTFLPDSSVSGTSL

SEQ ID NO: 704 - protein, 829 aa, Homo sapiens
MAKYNTGGNPTEDVSVNSRPFRVTGPNSSSGIQARKNLFNNQGNASPPAGPSNVPKFGSPKPPVAVKPSSEEKPDKEPKPPFLKPTGAGQRFGTPASLTTRDPEAKVGFLKPVGPKPINLPKEDSKPTFPWPPGNKPSLHSVNQDHDLKPLGPKSGPTPPTSENEQKQAFPKLTGVKGKFMSASQDLEPKPLFPKPAFGQKPPLSTENSHEDESPMKNVSSSKGSPAPLGVRSKSGPLKPAREDSENKDHAGEISSLPFPGVVLKPAASRGGPGLSKNGEEKKEDRKIDAAKNTFQSKINQEELASGTPPARFPKAPSKLTVGGPWGQSQEKEKGDKNSATPKQKPLPPLFTLGPPPPKPNRPPNVDLTKFHKTSSGNSTSKGQTSYSTTSLPPPPPSHPASQPPLPASHPSQPPVPSLPPRNIKPPFDLKSPVNEDNQDGVTHSDGAGNLDEEQDSEGETYEDIEASKEREKKREKEEKKRLELEKKEQKEKEKKEQEIKKKFKLTGPIQVIHLAKACCDVKGGKNELSFKQGEQIEIIRITDNPEGKWLGRTARGSYGYIKTTAVEIDYDSLKLKKDSLGAPSRPIEDDQEVYDDVAEQDDISSHSQSGSGGIFPPPPDDDIYDGIEEEDADDGSTLQVQEKSNTWSWGILKMLKGKDDRKKSIREKPKVSDSDNNEGSSFPAPPKQLDMGDEVYDDVDTSDFPVSSAEMSQGTNVGKAKTEEKDLKKLKKQEKEEKDFRKKFKYDGEIRVLYSTKVTTSITSKKWGTRDLQVKPGESLEVIQTTDDTKVLCRNEEGKYGYVLRSYLADNDGEIYDDIADGCIYDND

SEQ ID NO: 705 - protein, 117 aa, Homo sapiens
MKFVYKEEHPFEKRRSEGEKIRKKYPDRVPVIVEKAPKARIGDLDKKKYLVPSDLTVGQFYFLIRKRIHLRAEDALFFFVNNVIPPTSATMGQLYQEHHEEDFFLYIAYSDESVYGL

SEQ ID NO: 706 - protein, 1684 aa, Homo sapiens; identical to SEQ ID NO: 119

SEQ ID NO: 707 - protein, 970 aa, Homo sapiens
MDAAEPGLPPGPEGRKRYSDIFRSLDNLEISLGNVTLEMLAGDPLLSEDPEPDKTPTATVTNEASCWSGPSPEGPVPLTGEELDLRLIRTKGGVDAALEYAKTWSRYAKELLAWTEKRASYELEFAKSTMKIAEAGKVSIQQQSHMPLQYIYTLFLEHDLSLGTLAMETVAQQKRDYYQPLAAKRTEIEKWRKEFKEQWMKEQKRMNEAVQALRRAQLQYVQRSEDLRARSQGSPEDSAPQASPGPSKQQERRRRSREEAQAKAQEAEALYQACVREANARQQDLEIAKQRIVSHVRKLVFQGDEVLRRVTLSLFGLRGAQAERGPRAFAALAECCAPFEPGQRYQEFVRALRPEAPPPPPPAFSFQEFLPSLNSSPLDIRKKLSGPLPPRLDENSAEPGPWEDPGTGWRWQGTPGPTPGSDVDSVGGGSESRSLDSPTSSPGAGTRQLVKASSTGTESSDDFEERDPDLGDGLENGLGSPFGKWTLSSAAQTHQLRRLRGPAKCRECEAFMVSGTECEECFLTCHKRCLETLLILCGHRRLPARTPLFGVDFLQLPRDFPEEVPFVVTKCTAEIEHRALDVQGIYRVSGSRVRVERLCQAFENGRALVELSGNSPHDVSSVLKRFLQELTEPVIPFHLYDAFISLAKTLHADPGDDPGTPSPSPEVIRSLKTLLVQLPDSNYNTLRHLVAHLFRVAARFMENKMSANNLGIVFGPTLLRPPDGPRAASAIPVTCLLDSGHQAQLVEFLIVHYEQIFGMDELPQATEPPPQDSSPAPGPLTTSSQPPPPHLDPDSQPPVLASDPGPDPQHHSTLEQHPTATPTEIPTPQSDQREDVAEDTKDGGGEVSSQGPEDSLLGTQSRGHFSRQPVKYPRGGVRPVTHQLSSLALVASKLCEETPITSVPRGSLRGRGPSPAAASPEGSPLRRTPLPKHFEITQETARLLSKLDSEAVPRATCCPDVQPEEAEDHL

SEQ ID NO: 708 - protein, 381 aa, Homo sapiens
MSGVVRTLSRCLLPAEAGGARERRAGSGARDAEREARRRSRDIDALLARERRAVRRLVKILLLGAGESGKSTFLKQMRIIHGREFDQKALLEFRDTIFDNILKGSRVLVDARDKLGIPWQYSENEKHGMFLMAFENKAGLPVEPATFQLYVPALSALWRDSGIREAFSRRSEFQLGESVKYFLDNLDRIGQLNYFPSKQDILLARKATKGIVEHDFVIKKIPFKMVDVGGQRSQRQKWFQCFDGITSILFMVSSSEYDQVLMEDRRTNRLVESMNIFETIVNNKLFFNVSIILFLNKMDLLVEKVKTVSIKKHFPDFRGDPHRLEDVQRYLVQCFDRKRRNRSKPLFHHFTTAIDTENVRFVFHAVKDTILQENLKDIMLQ

SEQ ID NO: 709 - protein, 359 aa, Homo sapiens
MTLESIMACCLSEEAKEARRINDEIERQLRRDKRDARRELKLLLLGTGESGKSTFIKQMRIIHGSGYSDEDKRGFTKLVYQNIFTAMQAMIRAMDTLKIPYKYEHNKAHAQLVREVDVEKVSAFENPYVDAIKSLWNDPGIQECYDRRREYQLSDSTKYYLNDLDRVADPAYLPTQQDVLRVRVPTTGIIEYPFDLQSVIFRMVDVGGQRSERRKWIHCFENVTSIMFLVALSEYDQVLVESDNENRMEESKALFRTIITYPWFQNSSVILFLNKKDLLEEKIMYSHLVDYFPEYDGPQRDAQAAREFILKMFVDLNPDSDKIIYSHFTCATDTENIRFVFAAVKDTILQLNLKEYNLV

SEQ ID NO: 710 - protein, 137 aa, Homo sapiens
MRPQQAPVSGKVFIQRDYSSGTRCQFQTKFPAELENRIDRQQFEETVRTLNNLYAEAEKLGGQSYLEGCLACLTAYTIFLCMETHYEKVLKKVSKYIQEQNEKIYAPQGLLLTDPIERGLRVIEITIYEDRGMSSGR

SEQ ID NO: 711 - protein, 474 aa, Homo sapiens
MAQHDFVPAWLNFSTPQSAKSPTATFEKHGEHLPRGEGRFGVSRRRHNSSDGFFNNGPLRTAGDSWHQPSLFRHDSVDSGVSKGAYAGITGNPSGWHSSSRGHDGMSQRSGGGTGNHRHWNGSFHSRKGCAFQEKPPMEIREEKKEDKVEKLQFEEEDFPSLNPEAGKQHQPCRPIGTPSGVWENPPSAKQPSKMLVIKKVSKEDPAAAFSAAFTSPGSHHANGNKLSSVVPSVYKNLVPKPVPPPSKPNAWKANRMEHKSGSLSSSRESAFTSPISVTKPVVLASGAALSSPKESPSSTTPPIEISSSRLTKLTRRTTDRKSEFLKTLKDDRNGDFSENRDCDKLEDLEDNSTPEPKENGEEGCHQNGLALPVVEEGEVLSHSLEAEHRLLKAMGWQEYPENDENCLPLTEDELKEFHMKTEQLRRNGFGKNGFLQSRSSSLFSPWRSTCKAEFEDSDTETSSSETSDDDAWK

SEQ ID NO: 712 - protein, 549 aa, Homo sapiens
MATPRGLGALLLLLLLPTSGQEKPTEGPRNTCLGSNNMYDIFNLNDKALCFTKCRQSGSDSCNVENLQRYWLNYEAHLMKEGLTQKVNTPFLKALVQNLSTNTAEDFYFSLEPSQVPRQVMKDEDKPPDRVRLPKSLFRSLPGNRSVVRLAVTILDIGPGTLFKGPRLGLGDGSGVLNNRLVGLSVGQMHVTKLAEPLEIVFSHQRPPPNMTLTCVFWDVTKGTTGDWSSEGCSTEVRPEGTVCCCDHLTFFALLLRPTLDQSTVHILTRISQAGCGVSMIFLAFTIILYAFLRLSRERFKSEDAPKIHVALGGSLFLLNLAFLVNVGSGSKGSDAACWARGAVFHYFLLCAFTWMGLEAFHLYLLAVRVFNTYFGHYFLKLSLVGWGLPALMVIGTGSANSYGLYTIRDRENRTSLELCWFREGTTMYALYITVHGYFLITFLFGMVVLALVVWKIFTLSRATAVKERGKNRKKVLTLLGLSSLVGVTWGLAIFTPLGLSTVYIFALFNSLQGVFICCWFTILYLPSQSTTVSSSTARLDQAHSASQE

SEQ ID NO: 713 - protein, 327 aa, Homo sapiens
MPALLERPKLSNAMARALHRHIMMERERKRQEEEEVDKMMEQKMKEEQERRKKKEMEERMSLEETKEQILKLEEKLLALQEEKHQLFLQLKKVLHEEEKRRRKEQSDLTTLTSAAYQQSLTVHTGTHLLSMQGSPGGHNRPGTLMAADRAKQMFGPQVLTTRHYVGSAAAFAGTPEHGQFQGSPGGAYGTAQPPPHYGPTQPAYSPSQQLRAPSAFPAVQYLSQPQPQPYAVHGHFQPTQTGFLQPGGALSLQKQMEHANQQTGFSDSSSLRPMHPQALHPAPGLLASPQLPVQMQPAGKSGFAATSQPGPRLPFIQHSQNPRFYHK

SEQ ID NO: 714 - protein, 160 aa, Homo sapiens
MEAERPQEEEDGEQGPPQDEEGWPPPNSTTRPWRSAPPSPPPPGTRHTALGPRSASLLSLQTELLLDLVAEAQSRRLEEQRATFYTPQNPSSLAPAPLRPLEDREQLYSTILSHQCQRMEAQRSEPPLPPGGQELLELLLRVQGGGRMEEQRSRPPTHTC

SEQ ID NO: 715 - protein, 217 aa, Homo sapiens [sequence omitted]

SEQ ID NO: 716 - protein, 433 aa, Homo sapiens
MSGRPRTTSFAESCKPVQQPSAFGSMKVSRDKDGSKVTTVVATPGQGPDRPQEVSYTDTKVIGNGSFGVVYQAKLCDSGELVAIKKVLQDKRFKNRELQIMRKLDHCNIVRLRYFFYSSGEKKDEVYLNLVLDYVPETVYRVARHYSRAKQTLPVIYVKLYMYQLFRSLAYIHSFGICHRDIKPQNLLLDPDTAVLKLCDFGSAKQLVRGEPNVSYICSRYYRAPELIFGATDYTSSIDVWSAGCVLAELLLGQPIFPGDSGVDQLVEIIKVLGTPTREQIREMNPNYTEFKFPQIKAHPWTKDSSGTGHFTSGVRVFRPRTPPEAIALCSRLLEYTPTARLTPLEACAHSFFDELRDPNVKLPNGRDTPALFNFTTQELSSNPPLATILIPPHARIQAAASTPTNATAASDANTGDRGQTNNAASASASNST

SEQ ID NO: 717 - protein, 128 aa, Homo sapiens
MWSTRSPNSTAWPLSLEPDPGMASASTTMHTTTIAEPDPGMSGWPDGRMETSTPTIMDIVVIAGVIAAVAIVLVSLLFVMLRYMYRHKGTYHTNEAKGTEFAESADAALQGDPALQDAGDSSRKEYFI

SEQ ID NO: 718 - protein, 657 aa, Homo sapiens; identical to SEQ ID NO: 121

SEQ ID NO: 719 - protein, 526 aa, Homo sapiens
LGGRSSCEDPGCPRDEERAPRMGCMKSKFLQVGGNTFSKTETSASPHCPVYVPDPTSTIKPGPNSHNSNTPGIREAGSEDIIVVALYDYEAIHHEDLSFQKGDQMVVLEESGEWWKARSLATRKEGYIPSNYVARVDSLETEEWFFKGISRKDAERQLLAPGNMLGSFMIRDSETTKGSYSLSVRDYDPRQGDTVKHYKIRTLDNGGFYISPRSTFSTLQELVDHYKKGNDGLCQKLSVPCMSSKPQKPWEKDAWEIPRESLKLEKKLGAGQFGEVWMATYNKHTKVAVKTMKPGSMSVEAFLAEANVMKTLQHDKLVKLHAVVTKEPIYIITEFMAKGSLLDFLKSDEGSKQPLPKLIDFSAQIAEGMAFIEQRNYIHRDLRAANILVSASLVCKIADFGLARVIEDNEYTAREGAKFPIKWTAPEAINFGSFTIKSDVWSFGILLMEIVTYGRIPYPGMSNPEVIRALERGYRMPRPENCPEELYNIMMRCWKNRPEERPTFEYIQSVLDDFYTATESQYQQQP

SEQ ID NO: 720 - protein, 1024 aa, Homo sapiens
MERRSRRKSRRNGRSTAGKAAATQPAKSPGAQLWLFPSAAGLHRALLRRVEVTRQLCCSPGRLAVLERGGAGVQVHQLLAGSGGARTPKCIKLGKNMKIHSVDQGAEHMLILSSDGKPFEYDNYSMKHLRFESILQEKKIIQITCGDYHSLALSKGGELFAWGQNLHGQLGVGRKFPSTTTPQIVEHLAGVPLAQISAGEAHSMALSMSGNIYSWGKNECGQLGLGHTESKDDPSLIEGLDNQKVEFVACGGSHSALLTQDGLLFTFGAGKHGQLGHNSTQNELRPCLVAELVGYRVTQIACGRWHTLAYVSDLGKVFSFGSGKDGQLGNGGTRDQLMPLPVKVSSSEELKLESHTSEKELIMIAGGNQSILLWIKKENSYVNLKRTIPTLNEGTVKRWIADVETKRWQSTKREIQEIFSSPACLTGSFLRKRRTTEMMPVYLDLNKARNIFKELTQKDWITNMITTCLKDNLLKRLPFHSPPQEALEIFFLLPECPMMHISNNWESLVVPFAKVVCKMSDQSSLVLEEYWATLQESTFSKLVQMFKTAVICQLDYWDESAEENGNVQALLEMLKKLHRVNQVKCQLPESIFQVDELLHRLNFFVEVCRRYLWKMTVDASENVQCCVIFSHFPFIFNNLSKIKLLHTDTLLKIESKKHKAYLRSAAIEEERESEFALRPTFDLTVRRNHLIEDVLNQLSQFENEDLRKELWVSFSGEIGYDLGGVKKEFFYCLFAEMIQPEYGMFMYPEGASCMWFPVKPKFEKKRYFFFGVLCGLSLFNCNVANLPFPLALFKKLLDQMPSLEDLKELSPDLGKNLQTLLDDEGDNFEEVFYIHFNVHWDRNDTNLIPNGSSITVNQTNKRDYVSKYINYIFNDSVKAVYEEFRRGFYKMCDEDIIKLFHPEELKDVIVGNTDYDWKTFEKNARYEPGYNSSHPTIVMFWKAFHKLTLEEKKKFLVFLTGTDRLQMKDLNNMKITFCCPESWNERDPIRALTCFSVLFLPKYSTMETVEEALQEAINNNRGFG

SEQ ID NO: 721 - protein, 1022 aa, Homo sapiens
MYFCWGADSRELQRRRTAGSPGAELLQAASGERHSLLLLTNHRVLSCGDNSRGQLGRRGAQRGELPEPIQALETLIVDLVSCGKEHSLAVCHKGRVFAWGAGSEGQLGIGEFKEISFTPKKIMTLNDIKIIQVSCGHYHSLALSKDSQVFSWGKNSHGQLGLGKEFPSQASPQRVRSLEGIPLAQVAAGGAHSFALSLCGTSFGWGSNSAGQLALSGRNVPVQSNKPLSVGALKNLGVVYISCGDAHTAVLTQDGKVFTFGDNRSGQLGYSPTPEKRGPQLVERIDGLVSQIDCGSYHTLAYVHTTGQVVSFGHGPSDTSKPTHPEALTENFDISCLISAEDFVDVQVKHIFAGTYANFVTTHQDTSSTRAPGKTLPEISRISQSMAEKWIAVKRRSTEHEMAKSEIRMIFSSPACLTASFLKKRGTGETTSIDVDLEMARDTFKKLTKKEWISSMITTCLEDDLLRALPCHSPHQEALSVFLLLPECPVMHDSKNWKNLVVPFAKAVCEMSKQSLQVLKKCWAFLQESSLNPLIQMLKAAIISQLLHQTKTEQDHCNVKALLGMMKELHKVNKANCRLPENTFNINELSNLLNFYIDRGRQLFRDNHLIPAETPSPVIFSDFPFIFNSLSKIKLLQADSHIKMQMSEKKAYMLMHETILQKKDEFPPSPRFILRVRRSRLVKDALRQLSQAEATDFCKVLVVEFINEICPESGGVSSEFFHCMFEEMTKPEYGMFMYPEMGSCMWFPAKPKPEKKRYFLFGMLCGLSLFNLNVANLPFPLALYKKLLDQKPSLEDLKELSPRLGKSLQEVLDDAADDIGDALCIRFSIHWDQNDVDLIPNGISIPVDQTNKRDYVSKYIDYIFNVSVKAVYEEFQRGFYRVCEKEILRHFYPEELMTAIIGNTDYDWKQFEQNSKYEQGYQKSHPTIQLFWKAFHKLTLDEKKKFLFFLTGRDRLHARGIQKMEIVFRCPETFSERDHPTSITCHNILSLPKYSTMERMEEALQVAINNNRGFVSPMLTQS

SEQ ID NO: 722 - protein, 635 aa, Homo sapiens
MSGAGRALAALLLAASVLSAALLAPGGSSGRDAQAAPPRDLDKKRHAELKMDQALLLIHNELLWTNLTVYWKSECCYHCLFQVLVNVPQSPKAGKPSAAAASVSTQHGSILQLNDTLEEKEVCRLEYRFGEFGNYSLLVKNIHNGVSEIACDLAVNEDPVDSNLPVSIAFLIGLAVIIVISFLRLLLSLDDFNNWISKAISSRETDRLINSELGSPSRTDPLDGDVQPATWRLSALPPRLRSVDTFRGIALILMVFVNYGGGKYWYFKHASWNGLTVADLVFPWFVFIMGSSIFLSMTSILQRGCSKFRLLGKIAWRSFLLICIGIIIVNPNYCLGPLSWDKVRIPGVLQRLGVTYFVVAVLELLFAKPVPEHCASERSCLSLRDITSSWPQWLLILVLEGLWLGLTFLLPVPGCPTGYLGPGGIGDFGKYPNCTGGAAGYIDRLLLGDDHLYQHPSSAVLYHTEVAYDPEGILGTINSIVMAFLGVQAGKILLYYKARTKDILIRFTAWCCILGLISVALTKVSENEGFIPVNKNLWSLSYVTTLSSFAFFILLVLYPVVDVKGLWTGTPFFYPGMNSILVYVGHEVFENYFPFQWKLKDNQSHKEHLTQNIVATALWVLIAYILYRKKIFWKI

SEQ ID NO: 723 - protein, 270 aa, Homo sapiens
MQYPHPGPAAGAVGVPLYAPTPLLQPAHPTPFYIEDILGRGPAAPTPAPTLPSPNSSFTSLVSPYRTPVYEPTPIHPAFSHHSAAALAAAYGPGGFGGPLYPFPRTVNDYTHALLRHDPLGKPLLWSPFLQRPLHKRKGGQVRFSNDQTIELEKKFETQKYLSPPERKRLAKMLQLSERQVKTWFQNRRAKWRRLKQENPQSNKKEELESLDSSCDQRQDLPSEQNKGASLDSSQCSPSPASQEDLESEISEDSDQEVDIEGDKSYFNAG

SEQ ID NO: 724 - protein, 1037 aa, Homo sapiens
MDRMASSMKQVPNPLPKVLSRRGVGAGLEAAERESFERTQTVSINKAINTQEVAVKEKHARTCILGTHHEKGAQTFWSVVNRLPLSSNAVLCWKFCHVFHKLLRDGHPNVLKDSLRYRNELSDMSRMWGHLSEGYGQLCSIYLKLLRTKMEYHTKNPRFPGNLQMSDRQLDEAGESDVNNFFQLTVEMFDYLECELNLFQTVFNSLDMSRSVSVTAAGQCRLAPLIQVILDCSHLYDYTVKLLFKLHSCLPADTLQGHRDRFMEQFTKLKDLFYRSSNLQYFKRLIQIPQLPENPPNFLRASALSEHISPVVVIPAEASSPDSEPVLEKDDLMDMDASQQNLFDNKFDDIFGSSFSSDPFNFNSQNGVNKDEKDHLIERLYREISGLKAQLENMKTESQRVVLQLKGHVSELEADLAEQQHLRQQAADDCEFLRAELDELRRQREDTEKAQRSLSEIERKAQANEQRYSKLKEKYSELVQNHADLLRKNAEVTKQVSMARQAQVDLEREKKELEDSLERISDQGQRKTQEQLEVLESLKQELATSQRELQVLQGSLETSAQSEANWAAEFAELEKERDSLVSGAAHREEELSALRKELQDTQLKLASTEESMCQLAKDQRKMLLVGSRKAAEQVIQDALNQLEEPPLISCAGSADHLLSTVTSISSCIEQLEKSWSQYLACPEDISGLLHSITLLAHLTSDAIAHGATTCLRAPPEPADSLTEACKQYGRETLAYLASLEEEGSLENADSTAMRNCLSKIKAIGEELLPRGLDIKQEELGDLVDKEMAATSAAIETATARIEEMLSKSRAGDTGVKLEVNERILGCCTSLMQAIQVLIVASKDLQREIVESGRGTASPKEFYAKNSRWTEGLISASKAVGWGATVMVDAADLVVQGRGKFEELMVCSHEIAASTAQLVAASKVKADKDSPNLAQLQQASRGVNQATAGVVASTISGKSQIEETDNMDFSSMTLTQIKRQEMDSQVRVLELENELQKERQKLGELRKKHYELAGVAEGWEEGTEASPPTLQEVVTEKE

SEQ ID NO: 725 - protein, 193 aa, Homo sapiens
MGKQNSKLRPEVLQDLRENTEFTDHELQEWYKGFLKDCPTGHLTVDEFKKIYANFFPYGDASKFAEHVFRTFDTNGDGTIDFREFIIALSVTSRGKLEQKLKWAFSMYDLDGNGYISRSEMLEIVQAIYKMVSSVMKMPEDESTPEKRTDKIFRQMDTNNDGKLSLEEFIRGAKSDPSIVRLLQCDPSSASQF

SEQ ID NO: 726 - protein, 700 aa, Homo sapiens [sequence omitted]

SEQ ID NO: 727 - protein, 547 aa, Homo sapiens
MATMVPSVLWPRACWTLLVCCLLTPGVQGQEFLLRVEPQNPVLSAGGSLFVNCSTDCPSSEKIALETSLSKELVASGMGWAAFNLSNVTGNSRILCSVYCNGSQITGSSNITVYRLPERVELAPLPPWQPVGQNFTLRCQVEDGSPRTSLTVVLLRWEEELSRQPAVEEPAEVTATVLASRDDHGAPFSCRTELDMQPQGLGLFVNTSAPRQLRTFVLPVTPPRLVAPRFLEVETSWPVDCTLDGLFPASEAQVYLALGDQMLNATVMNHGDTLTATATATARADQEGAREIVCNVTLGGERREARENLTVFSFLGPIVNLSEPTAHEGSTVTVSCMAGARVQVTLDGVPAAAPGQPAQLQLNATESDDGRSFFCSATLEVDGEFLHRNSSVQLRVLYGPKIDRATCPQHLKWKDKTRHVLQCQARGNPYPELRCLKEGSSREVPVGIPFFVNVTHNGTYQCQASSSRGKYTLVVVMDIEAGSSHFVPVFVAVLLTLGVVTIVLALMYVFREHQRSGSYHVREESTYLPLTSMQPTEAMGEEPSRAE

SEQ ID NO: 728 - protein, 444 aa, Homo sapiens
MAVTTRLTWLHEKILQNHFGGKRLSLLYKGSVHGFRNGVLLDRCCNQGPTLTVIYSEDHIIGAYAEESYQEGKYASIILFALQDTKISEWKLGLCTPETLFCCDVTKYNSPTNFQIDGRNRKVIMDLKTMENLGLAQNCTISIQDYEVFRCEDSLDERKIKGVIELRKSLLSALRTYEPYGSLVQQIRILLLGPIGAGKSSFFNSVRSVFQGHVTHQALVGTNTTGISEKYRTYSIRDGKDGKYLPFILCDSLGLSEKEGGLCRDDIFYILNGNIRDRYQFNPMESIKLNHHDYIDSPSLKDRIHCVAFVFDASSIQYFSSQMIVKIKRIRRELVNAGVVHVALLTHVDSMDLITKGDLIEIERCEPVRSKLEEVQRKLGFALSDISVVSNYSSEWELDPVKDVLILSALRRMLWAADDFLEDLPFEQIGNLREEIINCAQGKK

SEQ ID NO: 729 - protein, 130 aa, Homo sapiens
MRQKAVSLFLCYLLLFTCSGVEAGKKKCSESSDSGSGFWKALTFMAVGGGLAVAGLPALGFTGAGIAANSVAASLMSWSAILNGGGVPAGGLVATLQSLGAGGSSVVIGNIGALMGYATHKYLDSEEDEE

SEQ ID NO: 730 - protein, 1025 aa, Homo sapiens
MSNGYSTDENFRYLISCFRARVKMYIQVEPVLDYLTFLPAEVKEQIQRTVATSGNMQAVELLLSTLEKGVWHLGWTREFVEALRRTGSPLAARYMNPELTDLPSPSFENAHDEYLQLLNLLQPTLVDKLLVRDVLDKCMEEELLTIEDRNRIAAAENNGNESGVRELLKRIVQKENWFSAFLNVLRQTGNNELVQELTGSDCSESNAEIENLSQVDGPQVEEQLLSTTVQPNLEKEVWGMENNSSESSFADSSVVSESDTSLAEGSVSCLDESLGHNSNMGSDSGTMGSDSDEENVAARASPEPELQLRPYQMEVAQPALEGKNIIICLPTGSGKTRVAVYIAKDHLDKKKKASEPGKVIVLVNKVLLVEQLFRKEFQPFLKKWYRVIGLSGDTQLKISFPEVVKSCDIIISTAQILENSLLNLENGEDAGVQLSDFSLIIIDECHHTNKEAVYNNIMRHYLMQKLKNNRLKKENKPVIPLPQILGLTASPGVGGATKQAKAEEHILKLCANLDAFTIKTVKENLDQLKNQIQEPCKKFAIADATREDPFKEKLLEIMTRIQTYCQMSPMSDFGTQPYEQWAIQMEKKAAKEGNRKERVCAEHLRKYNEALQINDTIRMIDAYTHLETFYNEEKDKKFAVIEDDSDEGGDDEYCDGDEDEDDLKKPLKLDETDRFLMTLFFENNKMLKRLAENPEYENEKLTKLRNTIMEQYTRTEESARGIIFTKTRQSAYALSQWITENEKFAEVGVKAHHLIGAGHSSEFKPMTQNEQKEVISKFRTGKINLLIATTVAEEGLDIKECNIVIRYGLVTNEIAMVQARGRARADESTYVLVAHSGSGVIEHETVNDFREKMMYKAIHCVQNMKPEEYAHKILELQMQSIMEKKMKTKRNIAKHYKNNPSLITFLCKNCSVLACSGEDIHVIEKMHHVNMTPEFKELYIVRENKALQKKCADYQINGEIICKCGQAWGTMMVHKGLDLPCLKIRNFVVVFKNNSTKKQYKKWVELPITFPNLDYSECCLFSDED

SEQ ID NO: 731 - protein, 241 aa, Homo sapiens
MGTASRSNIARHLQTNLILFCVGAVGACTLSVTQPWYLEVDYTHEAVTIKCTFSATGCPSEQPTCLWFRYGAHQPENLCLDGCKSEADKFTVREALKENQVSLTVNRVTSNDSAIYICGIAFPSVPEARAKQTGGGTTLVVREIKLLSKELRSFLTALVSLLSVYVTGVCVAFILLSKSKSNPLRNKEIKEDSQKKKSARRIFQEIAQELYHKRHVETNQQSEKDNNTYENRRVLSNYERP

SEQ ID NO: 732 - protein, 756 aa, Homo sapiens
MSWSPSLTTQTCGAWEMKERLGTGGFGNVIRWHNQETGEQIAIKQCRQELSPRNRERWCLEIQIMRRLTHPNVVAARDVPEGMQNLAPNDLPLLAMEYCQGGDLRKYLNQFENCCGLREGAILTLLSDIASALRYLHENRIIHRDLKPENIVLQQGEQRLIHKIIDLGYAKELDQGSLCTSFVGTLQYLAPELLEQQKYTVTVDYWSFGTLAFECITGFRPFLPNWQPVQWHSKVRQKSEVDIVVSEDLNGTVKFSSSLPYPNNLNSVLAERLEKWLQLMLMWHPRQRGTDPTYGPNGCFKALDDILNLKLVHILNMVTGTIHTYPVTEDESLQSLKARIQQDTGIPEEDQELLQEAGLALIPDKPATQCISDGKLNEGHTLDMDLVFLFDNSKITYETQISPRPQPESVSCILQEPKRNLAFFQLRKVWGQVWHSIQTLKEDCNRLQQGQRAAMMNLLRNNSCLSKMKNSMASMSQQLKAKLDFFKTSIQIDLEKYSEQTEFGITSDKLLLAWREMEQAVELCGRENEVKLLVERMMALQTDIVDLQRSPMGRKQGGTLDDLEEQARELYRRLREKPRDQRTEGDSQEMVRLLLQAIQSFEKKVRVIYTQLSKTVVCKQKALELLPKVEEVVSLMNEDEKTVVRLQEKRQKELWNLLKIACSKVRGPVSGSPDSMNASRLSQPGQLMSQPSTASNSLPEPAKKSEELVAEAHNLCTLLENAIQDTVREQDQSFTALDWSWLQTEEEEHSCLEQAS

SEQ ID NO: 733 - protein, 325 aa, Homo sapiens
MAWSLGSWLGGCLLVSALGMVPPPENVRMNSVNFKNILQWESPAFAKGNLTFTAQYLSYRIFQDKCMNTTLTECDFSSLSKYGDHTLRVRAEFADEHSDWVNITFCPVDDTIIGPPGMQVEVLADSLHMRFLAPKIENEYETWTMKNVYNSWTYNVQYWKNGTDEKFQITPQYDFEVLRNLEPWTTYCVQVRGFLPDRNKAGEWSEPVCEQTTHDETVPSWMVAVILMASVFMVCLALLGCFALLWCVYKKTKYAFSPRNSLPQHLKEFLGHPHHNTLLFFSFPLSDENDVFDKLSVIAEDSESGKQNPGDSCSLGTPPGQGPQS

SEQ ID NO: 734 - protein, 427 aa, Homo sapiens
MEWPARLCGLWALLLCAGGGGGGGGAAPTETQPPVTNLSVSVENLCTVIWTWNPPEGASSNCSLWYFSHFGDKQDKKIAPETRRSIEVPLNERICLQVGSQCSTNESEKPSILVEKCISPPEGDPESAVTELQCIWHNLSYMKCSWLPGRNTSPDTNYTLYYWHRSLEKIHQCENIFREGQYFGCSFDLTKVKDSSFEQHSVQIMVKDNAGKIKPSFNIVPLTSRVKPDPPHIKNLSFHNDDLYVQWENPQNFISRCLFYEVEVNNSQTETHNVFYVQEAKCENPEFERNVENTSCFMVPGVLPDTLNTVRIRVKTNKLCYEDDKLWSNWSQEMSIGKKRNSTLYITMLLIVPVIVAGAIIVLLLYLKRLKIIIFPPIPDPGKIFKEMFGDQNDDTLHWKKYDIYEKQTKEETDSVVLIENLKKASQ

SEQ ID NO: 735 - protein, 631 aa, Homo sapiens
MDYSFDTTAEDPWVRISDCIKNLFSPIMSENHGHMPLQPNASLNEEEGTQGHPDGTPPKLDTANGTPKVYKSADSSTVKKGPPVAPKPAWFRQSLKGLRNRASDPRGLPDPALSTQPAPASREHLGSHIRASSSSSSIRQRISSFETFGSSQLPDKGAQRLSLQPSSGEAAKPLGKHEEGRFSGLLGRGAAPTLVPQQPEQVLSSGSPAASEARDPGVSESPPPGRQPNQKTLPPGPDPLLRLLSTQAEESQGPVLKMPSQRARSFPLTRSQSCETKLLDEKTSKLYSISSQVSSAVMKSLLCLPSSISCAQTPCIPKEGASPTSSSNEDSAANGSAETSALDTGFSLNLSELREYTEGLTEAKEDDDGDHSSLQSGQSVISLLSSEELKKLIEEVKVLDEATLKQLDGIHVTILHKEEGAGLGFSLAGGADLENKVITVHRVFPNGLASQEGTIQKGNEVLSINGKSLKGTTHHDALAILRQAREPRQAVIVTRKLTPEAMPDLNSSTDSAASASAASDVSVESTAEATVCTVTLEKMSAGLGFSLEGGKGSLHGDKPLTINRIFKGAASEQSETVQPGDEILQLGGTAMQGLTRFEAWNIIKALPDGPVTIVIRRKSLQSKETTAAGDS

SEQ ID NO: 736 - protein, 570 aa, Homo sapiens
MTLLWCVVSLYFYGILQSDASERCDDWGLDTMRQIQVFEDEPARIKCPLFEHFLKFNYSTAHSAGLTLIWYWTRQDRDLEEPINFRLPENRISKEKDVLWFRPTLLNDTGNYTCMLRNTTYCSKVAFPLEVVQKDSCFNSPMKLPVHKLYIEYGIQRITCPNVDGYFPSSVKPTITWYMGCYKIQNFNNVIPEGMNLSFLIALISNNGNYTCVVTYPENGRTFHLTRTLTVKVVGSPKNAVPPVIHSPNDHVVYEKEPGEELLIPCTVYFSFLMDSRNEVWWTIDGKKPDDITIDVTINESISHSRTEDETRTQILSIKKVTSEDLKRSYVCHARSAKGEVAKAAKVKQKVPAPRYTVELACGFGATVLLVVILIVVYHVYWLEMVLFYRAHFGTDETILDGKEYDIYVSYARNAEEEEFVLLTLRGVLENEFGYKLCIFDRDSLPGGIVTDETLSFIQKSRRLLVVLSPNYVLQGTQALLELKAGLENMASRGNINVILVQYKAVKETKVKELKRAKTVLTVIKWKGEKSKYPQGRFWKQLQVAMPVKKSPRRSSSDEQGLSYSSLKNV

SEQ ID NO: 737 - protein, 636 aa, Homo sapiens
MRGGRGAPFWLWPLPKLALLPLLWVLFQRTRPQGSAGPLQCYGVGPLGDLNCSWEPLGDLGAPSELHLQSQKYRSNKTQTVAVAAGRSWVAIPREQLTMSDKLLVWGTKAGQPLWPPVFVNLETQMKPNAPRLGPDVDFSEDDPLEATVHWAPPTWPSHKVLICQFHYRRCQEAAWTLLEPELKTIPLTPVEIQDLELATGYKVYGRCRMEKEEDLWGEWSPILSFQTPPSAPKDVWVSGNLCGTPGGEEPLLLWKAPGPCVQVSYKVWFWVGGRELSPEGITCCCSLIPSGAEWARVSAVNATSWEPLTNLSLVCLDSASAPRSVAVSSIAGSTELLVTWQPGPGEPLEHVVDWARDGDPLEKLNWVRLPPGNLSALLPGNFTVGVPYRITVTAVSASGLASASSVWGFREELAPLVGPTLWRLQDAPPGTPAIAWGEVPRHQLRGHLTHYTLCAQSGTSPSVCMNVSGNTQSVTLPDLPWGPCELWVTASTIAGQGPPGPILRLHLPDNTLRWKVLPGILFLWGLFLLGCGLSLATSGRCYHLRHKVLPRWVWEKVPDPANSSSGQPHMEQVPEAQPLGDLPILEVEEMEPPPVMESSQPAQATAPLDSGYEKHFLPTPEELGLLGPPRPQVLA

SEQ ID NO: 738 - protein, 825 aa, Homo sapiens
MGWLCSGLLFPVSCLVLLQVASSGNMKVLQEPTCVSDYMSISTCEWKMNGPTNCSTELRLLYQLVFLLSEAHTCIPENNGGAGCVCHLLMDDVVSADNYTLDLWAGQQLLWKGSFKPSEHVKPRAPGNLTVHTNVSDTLLLTWSNPYPPDNYLYNHLTYAVNIWSENDPADFRIYNVTYLEPSLRIAASTLKSGISYRARVRAWAQCYNTTWSEWSPSTKWHNSYREPFEQHLLLGVSVSCIVILAVCLLCYVSITKIKKEWWDQIPNPARSRLVAIIIQDAQGSQWEKRSRGQEPAKCPHWKNCLTKLLPCFLEHNMKRDEDPHKAAKEMPFQGSGKSAWCPVEISKTVLWPESISVVRCVELFEAPVECEEEEEVEEEKGSFCASPESSRDDFQEGREGIVARLTESLFLDLLGEENGGFCQQDMGESCLLPPSGSTSAHMPWDEFPSAGPKEAPPWGKEQPLHLEPSPPASPTQSPDNLTCTETPLVIAGNPAYRSFSNSLSQSPCPRELGPDPLLARHLEEVEPEMPCVPQLSEPTTVPQPEPETWEQILRRNVLQHGAAAAPVSAPTSGYQEFVHAVEQGGTQASAVVGLGPPGEAGYKAFSSLLASSAVSPEKCGFGASSGEEGYKPFQDLIPGCPGDPAPVPVPLFTFGLDREPPRSPQSSHLPSSSPEHLGLEPGEKVEDMPKPPLPQEQATDPLVDSLGSGIVYSALTCHLCGHLKQCHGQEDGGQTPVMASPCCGCCCGDRSSPPTTPLRAPDPSPGGVPLEASLCPASLAPSGISEKSKSSSSFHPAPGNAQSSSQTPKIVNFVSVGPTYMRVS

SEQ ID NO: 739 - protein, 468 aa, Homo sapiens
MLAVGCALLAALLAAPGAALAPRRCPAQEVARGVLTSLPGDSVTLTCPGVEPEDNATVHWVLRKPAAGSHPSRWAGMGRRLLLRSVQLHDSGNYSCYRAGRPAGTVHLLVDVPPEEPQLSCFRKSPLSNVVCEWGPRSTPSLTTKAVLLVRKFQNSPAEDFQEPCQYSQESQKFSCQLAVPEGDSSFYIVSMCVASSVGSKFSKTQTFQGCGILQPDPPANITVTAVARNPRWLSVTWQDPHSWNSSFYRLRFELRYRAERSKTFTTWMVKDLQHHCVIHDAWSGLRHVVQLRAQEEFGQGEWSEWSPEAMGTPWTESRSPPAENEVSTPMQALTTNKDDDNILFRDSANATSLPVQDSSSVPLPTFLVAGGSLAFGTLLCIAIVLRFKKTWKLRALKEGKTSMHPPYSLGQLVPERPRPTPVLVPLISPPVSPSSLGSDNTSSHNRPDARDPRSPYDISNTDYFFPR

SEQ ID NO: 740 - protein, 918 aa, Homo sapiens
MLTLQTWLVQALFIFLTTESTGELLDPCGYISPESPVVQLHSNFTAVCVLKEKCMDYFHVNANYIVWKTNHFTIPKEQYTIINRTASSVTFTDIASLNIQLTCNILTFGQLEQNVYGITIISGLPPEKPKNLSCIVNEGKKMRCEWDGGRETHLETNFTLKSEWATHKFADCKAKRDTPTSCTVDYSTVYFVNIEVWVEAENALGKVTSDHINFDPVYKVKPNPPHNLSVINSEELSSILKLTWTNPSIKSVIILKYNIQYRTKDASTWSQIPPEDTASTRSSFTVQDLKPFTEYVFRIRCMKEDGKGYWSDWSEEASGITYEDRPSKAPSFWYKIDPSHTQGYRTVQLVWKTLPPFEANGKILDYEVTLTRWKSHLQNYTVNATKLTVNLTNDRYLATLTVRNLVGKSDAAVLTIPACDFQATHPVMDLKAFPKDNMLWVEWTTPRESVKKYILEWCVLSDKAPCITDWQQEDGTVHRTYLRGNLAESKCYLITVTPVYADGPGSPESIKAYLKQAPPSKGPTVRTKKVGKNEAVLEWDQLPVDVQNGFIRNYTIFYRTIIGNETAVNVDSSHTEYTLSSLTSDTLYMVRMAAYTDEGGKDGPEFTFTTPKFAQGEIEAIVVPVCLAFLLTTLLGVLFCFNKRDLIKKHIWPNVPDPSKSHIAQWSPHTPPRHNFNSKDQMYSDGNFTDVSVVEIEANDKKPFPEDLKSLDLFKKEKINTEGHSSGIGGSSCMSSSRPSISSSDENESSQNTSSTVQYSTVVHSGYRHQVPSVQVFSRSESTQPLLDSEERPEDLQLVDHVDGGDGILPRQQYFKQNCSQHESSPDISHFERSKQVSSVNEEDFVRLKQQISDHISQSCGSGQMKMFQEVSAADAFGPGTEGQVERFETVGMEAATDEGMPKSYLPQTVRQGGYMPQ

SEQ ID NO: 741 - protein, 1188 aa, Homo sapiens; identical to SEQ ID NO: 130

SEQ ID NO: 742 - protein, 963 aa, Homo sapiens
MWCLHCNSERTQSLLELELDSGVEGEAPSSETGTSLDSPSAYPQGPLVPGSSLSPDHYEHTSVGAYGLYSGPPGQQQRTRRPKLQHSTSILRKQAEEEAIKRSRSLSESYELSSDLQDKQVEMLERKYGGRLVTRHAARTIQTAFRQYQMNKNFERLRSSMSENRMSRRIVLSNMRMQFSFEGPEKVHSSYFEGKQVSVTNDGSQLGALVSPECGDLSEPTTLKSPAPSSDFADAITELEDAFSRQVKSLAESIDDALNCRSLHTEEAPALDAARARDTEPQTALHGMDHRKLDEMTASYSDVTLYIDEEELSPPLPLSQAGDRPSSTESDLRLRAGGAAPDYWALAHKEDKADTDTSCRSTPSLERQEQRLRVEHLPLLTIEPPSDSSVDLSDRSERGSLKRQSAYERSLGGQQGSPKHGPHSGAPKSLPREEPELRPRPPRPLDSHLAINGSANRQSKSESDYSDGDNDSINSTSNSNDTINCSSESSSRDSLREQTLSKQTYHKEARNSWDSPAFSNDVIRKRHYRIGLNLFNKKPEKGVQYLIERGFVPDTPVGVAHFLLQRKGLSRQMIGEFLGNRQKQFNRDVLDCVVDEMDFSTMELDEALRKFQAHIRVQGEAQKVERLIEAFSQRYCICNPGVVRQFRNPDTIFILAFAIILLNTDMYSPNVKPERKMKLEDFIKNLRGVDDGEDIPREMLMGIYERIRKRELKTNEDHVSQVQKVEKLIVGKKPIGSLHPGLGCVLSLPHRRLVCYCRLFEVPDPNKPQKLGLHQREIFLFNDLLVVTKIFQKKKNSVTYSFRQSFSLYGMQVLLFENQYYPNGIRLTSSVPGADIKVLINFNAPNPQDRKKFTDDLRESIAEVQEMEKHRIESELEKQKGVVRPSMSQCSSLKKESGNGTLSRACLDDSYASGEGLKRSALSSSLRDLSEAGKRGRRSSAGSLESNVEFQPFEPLQPSVLCS

SEQ ID NO: 743 - protein, 165 aa, Homo sapiens
MGWDLTVKMLAGNEFQVSLSSSMSVSELKAQITQKIGVHAFQQRLAVHPSGVALQDRVPLASQGLGPGSTVLLVVDKCDEPLSILVRNNKGRSSTYEVRLTQTVAHLKQQVSGLEGVQDDLFWLTFEGKPLEDQLPLGEYGLKPLSTVFMNLRLRGGGTEPGGRS

SEQ ID NO: 744 - protein, 1163 aa, Homo sapiens
MTRTRAALLLFTALATSLGFNLDTEELTAFRVDSAGFGDSVVQYANSWVVVGAPQKITAANQTGGLYQCGYSTGACEPIGLQVPPEAVNMSLGLSLASTTSPSQLLACGPTVHHECGRNMYLTGLCFLLGPTQLTQRLPVSRQECPRQEQDIVFLIDGSGSISSRNFATMMNFVRAVISQFQRPSTQFSLMQFSNKFQTHFTFEEFRRSSNPLSLLASVHQLQGFTYTATAIQNVVHRLFHASYGARRDAAKILIVITDGKKEGDSLDYKDVIPMADAAGIIRYAIGVGLAFQNRNSWKELNDIASKPSQEHIFKVEDFDALKDIQNQLKEKIFAIEGTETTSSSSFELEMAQEGFSAVFTPDGPVLGAVGSFTWSGGAFLYPPNMSPTFINMSQENVDMRDSYLGYSTELALWKGVQSLVLGAPRYQHTGKAVIFTQVSRQWRMKAEVTGTQIGSYFGASLCSVDVDSDGSTDLVLIGAPHYYEQTRGGQVSVCPLPRGWRRWWCDAVLYGEQGHPWGRFGAALTVLGDVNGDKLTDVVIGAPGEEENRGAVYLFHGVLGPSISPSHSQRIAGSQLSSRLQYFGQALSGGQDLTQDGLVDLAVGARGQVLLLRTRPVLWVGVSMQFIPAEIPRSAFECREQVVSEQTLVQSNICLYIDKRSKNLLGSRDLQSSVTLDLALDPGRLSPRATFQETKNRSLSRVRVLGLKAHCENFNLLLPSCVEDSVTPITLRLNFTLVGKPLLAFRNLRPMLAADAQRYFTASLPFEKNCGADHICQDNLGISFSFPGLKSLLVGSNLELNAEVMVWNDGEDSYGTTITFSHPAGLSYRYVAEGQKQGQLRSLHLTCDSAPVGSQGTWSTSCRINHLIFRGGAQITFLATFDVSPKAVLGDRLLLTANVSSENNTPRTSKTTFQLELPVKYAVYTVVSSHEQFTKYLNFSESEEKESHVAMHRYQVNNLGQRDLPVSINFWVPVELNQEAVWMDVEVSHPQNPSLRCSSEKIAPPASDFLAHIQKNPVLDCSIAGCLRFRCDVPSFSVQEELDFTLKGNLSFGWVRQILQKKVSVVSVAEITFDTSVYSQLPGQEAFMRAQTTTVLEKYKVHNPTPLIVGSSIGGLLLLALITAVLYKVGFFKRQYKEMMEEANGQIAPENGTQTPSPPSEK

SEQ ID NO: 745 - protein, 769 aa, Homo sapiens
MLGLRPPLLALVGLLSLGCVLSQECTKFKVSSCRECIESGPGCTWCQKLNFTGPGDPDSIRCDTRPQLLMRGCAADDIMDPTSLAETQEDHNGGQKQLSPQKVTLYLRPGQAAAFNVTFRRAKGYPIDLYYLMDLSYSMLDDLRNVKKLGGDLLRALNEITESGRIGFGSFVDKTVLPFVNTHPDKLRNPCPNKEKECQPPFAFRHVLKLTNNSNQFQTEVGKQLISGNLDAPEGGLDAMMQVAACPEEIGWRNVTRLLVFATDDGFHFAGDGKLGAILTPNDGRCHLEDNLYKRSNEFDYPSVGQLAHKLAENNIQPIFAVTSRMVKTYEKLTEIIPKSAVGELSEDSSNVVHLIKNAYNKLSSRVFLDHNALPDTLKVTYDSFCSNGVTHRNQPRGDCDGVQINVPITFQVKVTATECIQEQSFVIRALGFTDIVTVQVLPQCECRCRDQSRDRSLCHGKGFLECGICRCDTGYIGKNCECQTQGRSSQELEGSCRKDNNSIICSGLGDCVCGQCLCHTSDVPGKLIYGQYCECDTINCERYNGQVCGGPGRGLCFCGKCRCHPGFEGSACQCERTTEGCLNPRRVECSGRGRCRCNVCECHSGYQLPLCQECPGCPSPCGKYISCAECLKFEKGPFGKNCSAACPGLQLSNNPVKGRTCKERDSEGCWVAYTLEQQDGMDRYLIYVDESRECVAGPNIAAIVGGTVAGIVLIGILLLVIWKALIHLSDLREYRRFEKEKLKSQWNNDNPLFKSATTTVMNPKFAES

SEQ ID NO: 746 - protein, 946 aa, Homo sapiens
MAVYCYALNSLVIMNSANEMKSGGGPGPSGSETPPPPRRAVLSPGSVFSPGRGASFLFPPAESLSPEEPRSPGGWRSGRRRLNSSSGSGSGSSGSSVSSPSWAGRLRGDRQQVVAAGTLSPPGPEEAKRKLRILQRELQNVQVNQKVGMFEAHIQAQSSAIQAPRSPRLGRARSPSPCPFRSSSQPPGRVLVQGARSEERRTKSWGEQCPETSGTDSGRKGGPSLCSSQVKKGMPPLPGRAAPTGSEAQGPSAFVRMEKGIPASPRCGSPTAMEIDKRGSPTPGTRSCLAPSLGLFGASLTMATEVAARVTSTGPHRPQDLALTEPSGRARELEDLQPPEALVERQGQFLGSETSPAPERGGPRDGEPPGKMGKGYLPCGMPGSGEPEVGKRPEETTVSVQSAESSDSLSWSRLPRALASVGPEEARSGAPVGGGRWQLSDRVEGGSPTLGLLGGSPSAQPGTGNVEAGIPSGRMLEPLPCWDAAKDLKEPQCPPGDRVGVQPGNSRVWQGTMEKAGLAWTRGTGVQSEGTWESQRQDSDALPSPELLPQDPDKPFLRKACSPSNIPAVIITDMGTQEDGALEETQGSPRGNLPLRKLSSSSASSTGFSSSYEDSEEDISSDPERTLDPNSAFLHTLDQQKPRVSKSWRKIKNMVHWSPFVMSFKKKYPWIQLAGHAGSFKAAANGRILKKHCESEQRCLDRLMVDVLRPFVPAYHGDVVKDGERYNQMDDLLADFDSPCVMDCKMGIRTYLEEELTKARKKPSLRKDMYQKMIEVDPEAPTEEEKAQRAVTKPRYMQWRETISSTATLGFRIEGIKKEDGTVNRDFKKTKTREQVTEAFREFTKGNHNILIAYRDRLKAIRTTLEVSPFFKCHEVIGSSLLFIHDKKEQAKVWMIDFGKTTPLPEGQTLQHDVPWQEGNREDGYLSGLNNLVDILTEMSQDAPLA

SEQ ID NO: 747 - protein, 1697 aa, Homo sapiens
MMAQFPTAMNGGPNMWAITSEERTKHDRQFDNLKPSGGYITGDQARNFFLQSGLPAPVLAEIWALSDLNKDGKMDQQEFSIAMKLIKLKLQGQQLPVVLPPIMKQPPMFSPLISARFGMGSMPNLSIPQPLPPAAPITSLSSATSGTNLPPLMMPTPLVPSVSTSSLPNGTASLIQPLPIPYSSSTLPHGSSYSLMMGGFGGASIQKAQSLIDLGSSSSTSSTASLSGNSPKTGTSEWAVPQPTRLKYRQKFNTLDKSMSGYLSGFQARNALLQSNLSQTQLATIWTLADVDGDGQLKAEEFILAMHLTDMAKAGQPLPLTLPPELVPPSFRGGKQIDSINGTLPSYQKMQEEEPQKKLPVTFEDKRKANYERGNMELEKRRQALMEQQQREAERKAQKEKEEWERKQRELQEQEWKKQLELEKRLEKQRELERQREEERRKDIERREAAKQELERQRRLEWERIRRQELLNQKNREQEEIVRLNSKKKNLHLELEALNGKHQQISGRLQDVRLKKQTQKTELEVLDKQCDLEIMEIKQLQQELQEYQNKLIYLVPEKQLLNERIKNMQFSNTPDSGVSLLHKKSLEKEELCQRLKEQLDALEKETASKLSEMDSFNNQLKCGNMDDSVLQCLLSLLSCLNNLFLLLKELRETYNTQQLALEQLYKIKRDKLKEIERKRLELMQKKKLEDEAARKAKQGKENLWKENLRKEEEEKQKRLQEEKTQEKIQEEERKAEEKQRKDKDTLKAEEKKRETASVLVNYRALYPFEARNHDEMSFNSGDIIQVDEKTVGEPGWLYGSFQGNFGWFPCNYVEKMPSSENEKAVSPKKALLPPTVSLSATSTSSEPLSSNQPASVTDYQNVSFSNLTVNTSWQKKSAFTRTVSPGSVSPIHGQGQVVENLKAQALCSWTAKKDNHLNFSKHDIITVLEQQENWWFGEVHGGRGWFPKSYVKIIPGSEVKREEPEALYAAVNKKPTSAAYSVGEEYIALYPYSSVEPGDLTFTEGEEILVTQKDGEWWTGSIGDRSGIFPSNYVKPKDQESFGSASKSGASNKKPEIAQVTSAYVASGSEQLSLAPGQLILILKKNTSGWWQGELQARGKKRQKGWFPASHVKLLGPSSERATPAFHPVCQVIAMYDYAANNEDELSFSKGQLINVMNKDDPDWWQGEINGVTGLFPSNYVKMTTDSDPSQQWCADLQTLDTMQPIERKRQGYIHELIQTEERYMADLQLVVEVFQKRMAESGFLTEGEMALIFVNWKELIMSNTKLLKALRVRKKTGGEKMPVQMIGDILAAELSHMQAYIRFCSCQLNGAALLQQKTDEDTDFKEFLKKLASDPRCKGMPLSSFLLKPMQRITRYPLLIRSILENTPESHADHSSLKLALERAEELCSQVNEGVREKENSDRLEWIQAHVQCEGLAEQLIFNSLTNCLGPRKLLHSGKLYKTKSNKELHGFLFNDFLLLTYMVKQFAVSSGSEKLFSSKSNAQFKMYKTPIFLNEVLVKLPTDPSSDEPVFHISHIDRVYTLRTDNINERTAWVQKIKAASEQYIDTEKKKREKAYQARSQKTSGIGRLMVHVIEATELKACKPNGKSNPYCEISMGSQSYTTRTIQDTLNPKWNFNCQFFIKDLYQDVLCLTLFDRDQFSPDDFLGRTEIPVAKIRTEQESKGPMTRRLLLHEVPTGEVWVRFDLQLFEQKTLL

SEQ ID NO: 748 - protein, 1154 aa, Homo sapiens
MQYLNIKEDCNAMAFCAKMRSSKKTEVNLEAPEPGVEVIFYLSDREPLRLGSGEYTAEELCIRAAQACRISPLCHNLFALYDENTKLWYAPNRTITVDDKMSLRLHYRMRFYFTNWHGTNDNEQSVWRHSPKKQKNGYEKKKIPDATPLLDASSLEYLFAQGQYDLVKCLAPIRDPKTEQDGHDIENECLGMAVLAISHYAMMKKMQLPELPKDISYKRYIPETLNKSIRQRNLLTRMRINNVFKDFLKEFNNKTICDSSVSTHDLKVKYLATLETLTKHYGAEIFETSMLLISSENEMNWFHSNDGGNVLYYEVMVTGNLGIQWRHKPNVVSVEKEKNKLKRKKLENKHKKDEEKNKIREEWNNFSYFPEITHIVIKESVVSINKQDNKKMELKLSSHEEALSFVSLVDGYFRLTADAHHYLCTDVAPPLIVHNIQNGCHGPICTEYAINKLRQEGSEEGMYVLRWSCTDFDNILMTVTCFEKSEQVQGAQKQFKNFQIEVQKGRYSLHGSDRSFPSLGDLMSHLKKQILRTDNISFMLKRCCQPKPREISNLLVATKKAQEWQPVYPMSQLSFDRILKKDLVQGEHLGRGTRTHIYSGTLMDYKDDEGTSEEKKIKVILKVLDPSHRDISLAFFEAASMMRQVSHKHIVYLYGVCVRDVENIMVEEFVEGGPLDLFMHRKSDVLTTPWKFKVAKQLASALSYLEDKDLVHGNVCTKNLLLAREGIDSECGPFIKLSDPGIPITVLSRQECIERIPWIAPECVEDSKNLSVAADKWSFGTTLWEICYNGEIPLKDKTLIEKERFYESRCRPVTPSCKELADLMTRCMNYDPNQRPFFRAIMRDINKLEEQNPDIVSEKKPATEVDPTHFEKRFLKRIRDLGEGHFGKVELCRYDPEGDNTGEQVAVKSLKPESGGNHIADLKKEIEILRNLYHENIVKYKGICTEDGGNGIKLIMEFLPSGSLKEYLPKNKNKINLKQQLKYAVQICKGMDYLGSRQYVHRDLAARNVLVESEHQVKIGDFGLTKAIETDKEYYTVKDDRDSPVFWYAPECLMQSKFYIASDVWSFGVTLHELLTYCDSDSSPMALFLKMIGPTHGQMTVTRLVNTLKEGKRLPCPPNCPDEVYQLMRKCWEFQPSNRTSFQNLIEGFEALLK

SEQ ID NO: 749 - protein, 623 aa, Homo sapiens
MSTQDERQINTEYAVSLLEQLKLFYEQQLFTDIVLIVEGTEFPCHKMVLATCSSYFRAMFMSGLSESKQTHVHLRNVDAATLQIIITYAYTGNLAMNDSTVEQLYETACFLQVEDVLQRCREYLIKKINAENCVRLLSFADLFSCEELKQSAKRMVEHKFTAVYHQDAFMQLSHDLLIDILSSDNLNVEKEETVREAAMLWLEYNTESRSQYLSSVLSQIRIDALSEVTQRAWFQGLPPNDKSVVVQGLYKSMPKFFKPRLGMTKEEMMIFIEASSENPCSLYSSVCYSPQAEKVYKLCSPPADLHKVGTVVTPDNDIYIAGGQVPLKNTKTNHSKTSKLQTAFRTVNCFYWFDAQQNTWFPKTPMLFVRIKPSLVCCEGYIYAIGGDSVGGELNRRTVERYDTEKDEWTMVSPLPCAWQWSAAVVVHDCIYVMTLNLMYCYFPRSDSWVEMAMRQTSRSFASAAAFGDKIFYIGGLHIATNSGIRLPSGTVDGSSVTVEIYDVNKNEWKMAANIPAKRYSDPCVRAVVISNSLCVFMRETHLNERAKYVTYQYDLELDRWSLRQHISERVLWDLGRDFRCTVGKLYPSCLEESPWKPPTYLFSTDGTEEFELDGEMVALPPV

SEQ ID NO: 750 - protein, 1395 aa, Homo sapiens
MYPICTVVVDGLPSESSSSSYPGPVSVSEMSLLHALGPVQTWLGQELEKCGIDAMIYTRYVLSLLLHDSYDYDLQEQENDIFLGWEKGAYKKWGKSKKKCSDLTLEEMKKQAAVQCLRSASDESSGIETLVEELCSRLKDLQSKQEEKIHKKLEGSPSPEAELSPPAKDQVEMYYEAFPPLSEKPVCLQEIMTVWNKSKVCSYSSSSSSSTAPPASTDTSSPKDCNSESEVTKERSSEVPTTVHEKTQSKSKNEKENKFSNGTIEEKPALYKKQIRHKPEGKIRPRSWSSGSSEAGSSSSGNQGELKASMKYVKVRHKAREIRNKKGRNGQSRLSLKHGEKAERNIHTGSSSSSSSGSVKQLCKRGKRPLKEIGRKDPGSTEGKDLYMENRKDTEYKEEPLWYTEPIAEYFVPLSRKSKLETTYRNRQDTSDLTSEAVEELSESVHGLCISNNNLHKTYLAAGTFIDGHFVEMPAVINEDIDLTGTSLCSLPEDNKYLDDIHLSELTHFYEVDIDQSMLDPGASETMQGESRILNMIRQKSKENTDFEAECCIVLDGMELQGERAIWTDSTSSVGAEGLFLQDLGNLAQFWECCSSSSGDADGESFGGDSPVRLSPILDSTVLNSHLLAGNQELFSDINEGSGINSCFSVFEVQCSNSVLPFSFETLNLGNENTDSSANMLGKTQSRLLIWTKNSAFEENEHCSNLSTRTCSPWSHSEETRSDNETLNIQFEESTQFNAEDINYVVPRVSSNYVDEELLDFLQDETCQQNSRTLGEIPTLVFKKTSKLESVCGIQLEQKTENKNFETTQVCNESPHGDGYSSGVIKDIWTKMADTNSVATVEIERTDAELFSADVNNYCCCLDAEAELETLQEPDKAVRRSEYHLWEGQKESLEKRAFASSELSNVDGGDYTTPSKPWDVAQDKENTFILGGVYGELKTFNSDGEWAVVPPSHTKGSLLQCAASDVVTIAGTDVFMTPGNSFAPGHRQLWKPFVSFEQNDQPKSGENGLNKGFSFIFHEDLLGACGNFQVEDPGLEYSFSSFDLSNPFSQVLHVECSFEPEGIASFSPSFKPKSILCSDSDSEVFHPRICGVDRTQYRAIRISPRTHFRPISASELSPGGGSESEFESEKDEANIPIPSQVDIFEDPQADLKPLEEDAEKEGHYYGKSELESGKFLPRLKKSGMEKSAQTSLDSQEESTGILSVGKQNQCLECSMNESLEIDLESSEANCKIMAQCEEEINNFCGCKAGCQFPAYEDNPVSSGQLEEFPVLNTDIQGMNRSQEKQTWWEKALYSPLFPASECEECYTNAKGESGLEEYPDAKETPSNEERLLDFNRVSSVYEARCTGERDSGAKSDGFRGKMCSSASSTSEETGSEGGGEWVGPSEEELFSRTHL

SEQ ID NO: 751 - protein, 303 aa, Homo sapiens
MCHGRIAPKSTSVFAVASVGHGVFLPLVILCTLLGDGLASVCPLPPEPENGGYICHPRPCRDPLTAGSVIEYLCAEGYMLKGDYKYLTCKNGEWKPAMEISCRLNEDKDTHTSLGVPTLSIVASTASSVALILLLVVLFVLLQPKLKSFHHSRRDQGVSGDQVSIMVDGVQVALPSYEEAVYGSSGHCVPPADPRVQIVLSEGSGPSGRSVPREQQLPDQGACSSAGGEDEAPGQSGLCEAWGSRASETVMVHQATTSSWVAGSGNRQLAHKETADSENSDIQSLLSLTSEEYTDDIPLLKEA

SEQ ID NO: 752 - protein, 411 aa, Homo sapiens
METPEVPVGSLIDFGPEAPTSSPLEAPPPVLQDGDGSLGDGASESETTESADSENDMGESPSHPSWDQDRRSSSNESFSSNQSTESTQDEETLALRDFMRGYVEKIFSGGEDLDQEEKAKFGEYCSSENGKGREWFARYVSAQRCNSKCVSEATFYRLVQSFAVVLFECHQMDDFGPAKNLMTMCFTYYHIGKPQLLPPESREKPAGSIDSYLKSANSWLAEKKDIAERLLKNTSARTENVKGFFGGLETKLKGPLARRNEEDENKPQEKRPRAVTAYSPEDEKKGEKIYLYTHLKQQPIWHTLRFWNAAFFDAVHCERTKRSPTTRGDAGEEEEKREKWCHMTQEERDDSLRFNENITFGQLGTFTHNMLAFGLNKKLCNDFLKKQAVIGNLDEEQYKLLSDHIEQMATE

SEQ ID NO: 753 - protein, 345 aa, Homo sapiens
MLMFDPVPVKQEAMDPVSVSYPSNYMESMKPNKYGVIYSTPLPEKFFQTPEGLSHGIQMEPVDLTVNKRSSPPSAGNSPSSLKFPSSHRRASPGLSMPSSSPPIKKYSPPSPGVQPFGVPLSMPPVMAAALSRHGIRSPGILPVIQPVVVQPVPFMYTSHLQQPLMVSLSEEMENSSSSMQVPVIESYEKPISQKKIKIEPGIEPQRTDYYPEEMSPPLMNSVSPPQALLQENHPSVIVQPGKRPLPVESPDTQRKRRIHRCDYDGCNKVYTKSSHLKAHRRTHTGEKPYKCTWEGCTWKFARSDELTRHFRKHTGIKPFQCPDCDRSFSRSDHLALHRKRHMLV

SEQ ID NO: 754 - protein, 283 aa, Homo sapiens
MDVLPMCSIFQELQIVHETGYFSALPSLEEYWQQTCLELERYLQSEPCYVSASEIKFDSQEDLWTKIILAREKKEESELKISSSPPEDTLISPSFCYNLETNSLNSDVSSESSDSSEELSPTAKFTSDPIGEVLVSSGKLSSSVTSTPPSSPELSREPSQLWGCVPGELPSPGKVRSGTSGKPGDKGNGDASPDGRRRVHRCHFNGCRKVYTKSSHLKAHQRTHTGEKPYRCSWEGCEWRFARSDELTRHFRKHTGAKPFKCSHCDRCFSRSDHLALHMKRHL

SEQ ID NO: 755 - protein, 302 aa, Homo sapiens
MDVLASYSIFQELQLVHDTGYFSALPSLEETWQQTCLELERYLQTEPRRISETFGEDLDCFLHASPPPCIEESFRRLDPLLLPVEAAICEKSSAVDILLSRDKLLSETCLSLQPASSSLDSYTAVNQAQLNAVTSLTPPSSPELSRHLVKTSQTLSAVDGTVTLKLVAKKAALSSVKVGGVATAAAAVTAAGAVKSGQSDSDQGGLGAEACPENKKRVHRCQFNGCRKVYTKSSHLKAHQRTHTGEKPYKCSWEGCEWRFARSDELTRHYRKHTGAKPFKCNHCDRCFSRSDHLALHMKRHI

SEQ ID NO: 756 - protein, 593 aa, Homo sapiens
METPPLPPACTKQGHQKPLDSKDDNTEKHCPVTVNPWHMKKAFKVMNELRSQNLLCDVTIVAEDMEISAHRVVLAACSPYFHAMFTGEMSESRAKRVRIKEVDGWTLRMLIDYVYTAEIQVTEENVQVLLPAAGLLQLQDVKKTCCEFLESQLHPVNCLGIRAFADMHACTDLLNKANTYAEQHFADVVLSEEFLNLGIEQVCSLISSDKLTISSEEKVFEAVIAWVNHDKDVRQEFMARLMEHVRLPLLPREYLVQRVEEEALVKNSSACKDYLIEAMKYHLLPTEQRILMKSVRTRLRTPMNLPKLMVVVGGQAPKAIRSVECYDFKEERWHQVAELPSRRCRAGMVYMAGLVFAVGGFNGSLRVRTVDSYDPVKDQWTSVANMRDRRSTLGAAVLNGLLYAVGGFDGSTGLSSVEAYNIKSNEWFHVAPMNTRRSSVGVGVVGGLLYAVGGYDGASRQCLSTVECYNATTNEWTYIAEMSTRRSGAGVGVLNNLLYAVGGHDGPLVRKSVEVYDPTTNAWRQVADMNMCRRNAGVCAVNGLLYVVGGDDGSCNLASVEYYNPTTDKWTVVSSCMSTGRSYAGVTVIDKPL

SEQ ID NO: 757 - protein, 519 aa, Homo sapiens
MFLLPLPAAGRVVVRRLAVRRFGSRSLSTADMTKGLVLGIYSKEKEDDVPQFTSAGENFDKLLAGKLRETLNISGPPLKAGKTRTFYGLHQDFPSVVLVGLGKKAAGIDEQENWHEGKENIRAAVAAGCRQIQDLELSSVEVDPCGDAQAAAEGAVLGLYEYDDLKQKKKMAVSAKLYGSGDQEAWQKGVLFASGQNLARQLMETPANEMTPTRFAEIIEKNLKSASSKTEVHIRPKSWIEEQAMGSFLSVAKGSDEPPVFLEIHYKGSPNANEPPLVFVGKGITFDSGGISIKASANMDLMRADMGGAATICSAIVSAAKLNLPINIIGLAPLCENMPSGKANKPGDVVRAKNGKTIQVDNTDAEGRLILADALCYAHTFNPKVILNAATLTGAMDVALGSGATGVFTNSSWLWNKLFEASIETGDRVWRMPLFEHYTRQVVDCQLADVNNIGKYRSAGACTAAAFLKEFVTHPKWAHLDIAGVMTNKDEVPYLRKGMTGRPTRTLIEFLLRFSQDNA

SEQ ID NO: 758 - protein, 262 aa, Homo sapiens
MDPRLSTVRQTCCCFNVRIATTALAIYHVIMSVLLFIEHSVEVAHGKASCKLSQMGYLRIADLISSFLLITMLFIISLSLLIGVVKNREKYLLPFLSLQIMDYLLCLLTLLGSYIELPAYLKLASRSRASSSKFPLMTLQLLDFCLSILTLCSSYMEVPTYLNFKSMNHMNYLPSQEDMPHNQFIKMMIIFSIAFITVLIFKVYMFKCVWRCYRLIKCMNSVEEKRNSKMLQKVVLPSYEEALSLPSKTPEGGPAPPPYSEV

SEQ ID NO: 759 - protein, 243 aa, Homo sapiens
MSSGTELLWPGAALLVLLGVAASLCVRCSRPGAKRSEKIYQQRSLREDQQSFTGSRTYSLVGQAWPGPLADMAPTRKDKLLQFYPSLEDPASSRYQNFSKGSRHGSEEAYIDPIAMEYYNWGRFSKPPEDDDANSYENVLICKQKTTETGAQQEGIGGLCRGDLSLSLALKTGPTSGLCPSASPEEDEESEDYQNSASIHQWRESRKVMGQLQREASPGPVGSPDEEDGEPDYVNGEVAATEA

SEQ ID NO: 760 - protein, 533 aa, Homo sapiens
MALRNVPFRSEVLGWDPDSLADYFKKLNYKDCEKAVKKYHIDGARFLNLTENDIQKFPKLRVPILSKLSQEINKNEERRSIFTRKPQVPRFPEETESHEEDNGGWSSFEEDDYESPNDDQDGEDDGDYESPNEEEEAPVEDDADYEPPPSNDEEALQNSILPAKPFPNSNSMYIDRPPSGKTPQQPPVPPQRPMAALPPPPAGRNHSPLPPPQTNHEEPSRSRNHKTAKLPAPSIDRSTKPPLDRSLAPFDREPFTLGKKPPFSDKPSIPAGRSLGEHLPKIQKPPLPPTTERHERSSPLPGKKPPVPKHGWGPDRRENDEDDVHQRPLPQPALLPMSSNTFPSRSTKPSPMNPLPSSHMPGAFSESNSSFPQSASLPPYFSQGPSNRPPIRAEGRNFPLPLPNKPRPPSPAEEENSLNEEWYVSYITRPEAEAALRKINQDGTFLVRDSSKKTTTNPYVLMVLYKDKVYNIQIRYQKESQVYLLGTGLRGKEDFLSVSDIIDYFRKMPLLLIDGKNRGSRYQCTLTHAAGYP

SEQ ID NO: 761 - protein, 308 aa, Homo sapiens
MDALKSAGRALIRSPSLAKQSWGGGGRHRKLPENWTDTRETLLEGMLFSLKYLGMTLVEQPKGEELSAAAIKRIVATAKASGKKLQKVTLKVSPRGIILTDNLTNQLIENVSIYRISYCTADKMHDKVFAYIAQSQHNQSLECHAFLCTKRKMAQAVTLTVAQAFKVAFEFWQVSKEEKEKRDKASQEGGDVLGARQDCTPSLKSLVATGNLLDLEETAKAPLSTVSANTTNMDEVPRPQALSGSSVVWELDDGLDEAFSRLAQSRTNPQVLDTGLTAQDMHYAQCLSPVDWDKPDSSGTEQDDLFSF

SEQ ID NO: 762 - protein, 399 aa, Homo sapiens
MPQLSGGGGGGGGDPELCATDEMIPFKDEGDPQKEKIFAEISHPEEEGDLADIKSSLVNESEIIPASNGHEVARQAQTSQEPYHDKAREHPDDGKHPDGGLYNKGPSYSSYSGYIMMPNMNNDPYMSNGSLSPPIPRTSNKVPVVQPSHAVHPLTPLITYSDEHFSPGSHPSHIPSDVNSKQGMSRHPPAPDIPTFYPLSPGGVGQITPPLGWQGQPVYPITGGFRQPYPSSLSVDTSMSRFSHHMIPGPPGPHTTGIPHPAIVTPQVKQEHPHTDSDLMHVKPQHEQRKEQEPKRPHIKKPLNAFMLYMKEMRANVVAECTLKESAAINQILGRRWHALSREEQAKYYELARKERQLHMQLYPGWSARDNYGKKKKRKREKLQESASGTGPRMTAAYI

SEQ ID NO: 763 - protein, 466 aa, Homo sapiens
MTPILTVLICLGLSLGPRTHVQAGHLPKPTLWAEPGSVIIQGSPVTLRCQGSLQAEEYHLYRENKSASWVRRIQEPGKNGQFPIPSITWEHAGRYHCQYYSHNHSSEYSDPLELVVTGAYSKPTLSALPSPVVTSGGNVTLQCVSQVAFDGFILCKEGEDEHPQRLNSHSHARGWSWAIFSVGPVSPSRRWSYRCYAYDSNSPYVWSLPSDLLELLVPGVSKKPSLSVQPGPMVAPGESLTLQCVSDVGYDRFVLYKEGERDFLQRPGWQPQAGLSQANFTLGPVSPSHGGQYRCYSAHNLSSEWSAPSDPLDILITGQFYDRPSLSVQPVPTVAPGKNVTLLCQSRGQFHTFLLTKEGAGHPPLHLRSEHQAQQNQAEFRMGPVTSAHVGTYRCYSSLSSNPYLLSLPSDPLELVVSASLGQHPQDYTVENLIRMGVAGLVLVVLGILLFEAQHSQRSLQDAAGR

SEQ ID NO: 764 - protein, 632 aa, Homo sapiens
MTPALTALLCLGLSLGPRTRVQAGPFPKPTLWAEPGSVISWGSPVTIWCQGSLEAQEYQLDKEGSPEPLDRNNPLEPKNKARFSIPSMTQHHAGRYRCHYYSSAGWSEPSDPLELVMTGFYNKPTLSALPSPVVASGGNMTLRCGSQKGYHHFVLMKEGEHQLPRTLDSQQLHSGGFQALFPVGPVTPSHRWRFTCYYYYTNTPRVWSHPSDPLEILPSGVSRKPSLLTLQGPVLAPGQSLTLQCGSDVGYDRFVLYKEGERDFLQRPGQQPQAGLSQANFTLGPVSPSHGGQYRCYGAHNLSSEWSAPSDPLNILMAGQIYDTVSLSAQPGPTVASGENVTLLCQSRGYFDTFLLTKEGAAHPPLRLRSMYGAHKYQAEFPMSPVTSAHAGTYRCYGSYSSNPHLLSFPSEPLELMVSGHSGGSSLPPTGPPSTPGLGRYLEVLIGVSVAFVLLLFLLLFLLLRRQRHSKHRTSDQRKTDFQRPAGAAETEPKDRGLLRRSSPAADVQEENLYAAVKDTQSEDRVELDSQQSPHDEDPQAVTYAPVKHSSPRREMASPPSSLSGEFLDTKDRQVEEDRQMDTEAAASEASQDVTYAQLHSLTLRRKATEPPPSQEGEPPAEPSIYATLAIH

SEQ ID NO: 765 - protein, 638 aa, Homo sapiens
MSALAGEDVWRCPGCGDHIAPSQIWYRTVNETWHGSCFRCSECQDSLTNWYYEKDGKLYCPKDYWGKFGEFCHGCSLLMTGPFMVAGEFKYHPECFACMSCKVIIEDGDAYALVQHATLYCGKCHNEVVLAPMFERLSTESVQEQLPYSVTLISMPATTEGRRGFSVSVESACSNYATTVQVKEVNRMHISPNNRNAIHPGDRILEINGTPVRTLRVEEVEDAISQTSQTLQLLIEHDPVSQRLDQLRLEARLAPHMQNAGHPHALSTLDTKENLEGTLRRRSLRRSNSISKSPGPSSPKEPLLFSRDISRSESLRCSSSYSQQIFRPCDLIHGEVLGKGFFGQAIKVTHKATGKVMVMKELIRCDEETQKTFLTEVKVMRSLDHPNVLKFIGVLYKDKKLNLLTEYIEGGTLKDFLRSMDPFPWQQKVRFAKGIASGMAYLHSMCIIHRDLNSHNCLIKLDKTVVVADFGLSRLIVEERKRAPMEKATTKKRTLRKNDRKKRYTVVGNPYWMAPEMLNGKSYDETVDIFSFGIVLCEIIGQVYADPDCLPRTLDFGLNVKLFWEKFVPTDCPPAFFPLAAICCRLEPESRPAFSKLEDSFEALSLYLGELGIPLPAELEELDHTVSMQYGLTRDSPP

SEQ ID NO: 766 - protein, 351 aa, Homo sapiens
MVIMGQCYYNETIGFFYNNSGKELSSHWRPKDVVVVALGLTVSVLVLLTNLLVIAAIASNRRFHQPIYYLLGNLAAADLFAGVAYLFLMFHTGPRTARLSLEGWFLRQGLLDTSLTASVATLLAIAVERHRSVMAVQLHSRLPRGRVVMLIVGVWVAALGLGLLPAHSWHCLCALDRCSRMAPLLSRSYLAVWALSSLLVFLLMVAVYTRIFFYVRRRVQRMAEHVSCHPRYRETTLSLVKTVVIILGAFVVCWTPGQVVLLLDGLGCESCNVLAVEKYFLLLAEANSLVNAAVYSCRDAEMRRTFRRLLCCACLRQSTRESVHYTSSAQGGASTRIMLPENGHPLMDSTL

SEQ ID NO: 767 - protein, 896 aa, Homo sapiens; identical to SEQ ID NO: 140

SEQ ID NO: 768 - protein, 499 aa, Homo sapiens
MNDDPSMEENGVERVCPESLLQSREYSSLPLPRHTSSTDGTITSSDPGLEILNMASCDLDRNSLCKKEEDTRSASPTIEAQGTSPAHDNIAFQDSTSKDKTILNLEAKEEPETIEEHKKEHASGDSVVSPLPVTTVKSVNLRQSENTSANEKEVEAEFLRLSLGFKCDWFTLEKRVKLEERSRDLAEENLKKEITNCLKLLESLTPLCEDDNQAQEIIKKLEKSIKFLSQCAARVASRAEMLGAINQESRVSKAVEVMIQHVENLKRMYAKEHAELEELKQVLLQNERSFNPLEDDDDCQIKKRSASLNSKPSSLRRVTIASLPRNIGNAGMVAGMENNDRFSRRSSSWRILGSKQSEHRPSLPRFISTYSWADAEEEKCELKTKDDSEPSGEETVERTRKPSLSEKKNNPSKWDVSSVYDTIASWATNLKSSIRKANKALWLSIAFIVLFAALMSFLTGQLFQKSVDAAPTQQEDSWTSLEHILWPFTRLRHNGPPPV

SEQ ID NO: 769 - protein, 713 aa, Homo sapiens
MLLATLLLLLLGGALAHPDRIIFPNHACEDPPAVLLEVQGTLQRPLVRDSRTSPANCTWLILGSKEQTVTIRFQKLHLACGSERLTLRSPLQPLISLCEAPPSPLQLPGGNVTITYSYAGARAPMGQGFLLSYSQDWLMCLQEEFQCLNHRCVSAVQRCDGVDACGDGSDEAGCSSDPFPGLTPRPVPSLPCNVTLEDFYGVFSSPGYTHLASVSHPQSCHWLLDPHDGRRLAVRFTALDLGFGDAVHVYDGPGPPESSRLLRSLTHFSNGKAVTVETLSGQAVVSYHTVAWSNGRGFNATYHVRGYCLPWDRPCGLGSGLGAGEGLGERCYSEAQRCDGSWDCADGTDEEDCPGCPPGHFPCGAAGTSGATACYLPADRCNYQTFCADGADERRCRHCQPGNFRCRDEKCVYETWVCDGQPDCADGSDEWDCSYVLPRKVITAAVIGSLVCGLLLVIALGCTCKLYAIRTQEYSIFAPLSRMEAEIVQQQAPPSYGQLIAQGAIPPVEDFPTENPNDNSVLGNLRSLLQILRQDMTPGGGPGARRRQRGRLMRRLVRRLRRWGLLPRTNTPARASEARSQVTPSAAPLEALDGGTGPAREGGAVGGQDGEQAPPLPIKAPLPSASTSPAPTTVPEAPGPLPSLPLEPSLLSGVVQALRGRLLPSLGPPGPTRSPPGPHTAVLALEDEDDVLLVPLAEPGVWVAEAEDEPLLT

SEQ ID NO: 770 - protein, 104 aa, Homo sapiens
MLSRNDDICIYGGLGLGGLLLLAVVLLSACLCWLHRRVKRLERSWHLLSWSQAQGSSEQELHYASLQRLPVPSSEGPDLRGRDKRGTKEDPRADYACIAENKPT

SEQ ID NO: 771 - protein, 244 aa, Homo sapiens
MGALGLEGRGGRLQGRGSLLLAVAGATSLVTLLLAVPITVLAVLALVPQDQGGLVTETADPGAQAQQGLGFQKLPEEEPETDLSPGLPAAHLIGAPLKGQGLGWETTKEQAFLTSGTQFSDAEGLALPQDGLYYLYCLVGYRGRAPPGGGDPQGRSVTLRSSLYRAGGAYGPGTPELLLEGAETVTPVLDPARRQGYGPLWYTSVGFGGLVQLRRGERVYVNISHPDMVDFARGKTFFGAVMVG

SEQ ID NO: 772 - protein, 280 aa, Homo sapiens
MCPPQAQAEVGPTMTEKAEMVCAPSPAPAPPPKPASPGPPQVEEVGHRGGSSPPRLPPGVPVISLGHSRPPGVAMPTTELGTLRPPLLQLSTLGTAPPTLALHYHPHPFLNSVYIGPAGPFSIFPSSRLKRRPSHCELDLAEGHQPQKVARRVFTNSRERWRQQNVNGAFAELRKLLPTHPPDRKLSKNEVLRLAMKYIGFLVRLLRDQAAALAAGPTPPGPRKRPVHRVPDDGARRGSGRRAEAAARSQPAPPADPDGSPGGAARPIKMEQTALSPEVR

SEQ ID NO: 773 - protein, 512 aa, Homo sapiens
MGCIKSKGKDSLSDDGVDLKTQPVRNTERTIYVRDPTSNKQQRPVPESQLLPGQRFQTKDPEEQGDIVVALYPYDGIHPDDLSFKKGEKMKVLEEHGEWWKAKSLLTKKEGFIPSNYVAKLNTLETEEWFFKDITRKDAERQLLAPGNSAGAFLIRESETLKGSFSLSVRDFDPVHGDVIKHYKIRSLDNGGYYISPRITFPCISDMIKHYQKQADGLCRRLEKACISPKPQKPWDKDAWEIPRESIKLVKRLGAGQFGEVWMGYYNNSTKVAVKTLKPGTMSVQAFLEEANLMKTLQHDKLVRLYAVVTREEPIYIITEYMAKGSLLDFLKSDEGGKVLLPKLIDFSAQIAEGMAYIERKNYIHRDLRAANVLVSESLMCKIADFGLARVIEDNEYTAREGAKFPIKWTAPEAINFGCFTIKSDVWSFGILLYEIVTYGKIPYPGRTNADVMTALSQGYRMPRVENCPDELYDIMKMCWKEKAEERPTFDYLQSVLDDFYTATEGQYQQQP

SEQ ID NO: 774 - protein, 3801 aa, Homo sapiens
MSTDSNSLAREFLTDVNRLCNAVVQRVEAREEEEEETHMATLGQYLVHGRGFLLLTKLNSIIDQALTCREELLTLLLSLLPLVWKIPVQEEKATDFNLPLSADIILTKEKNSSSQRSTQEKLHLEGSALSSQVSAKVNVFRKSRRQRKITHRYSVRDARKTQLSTSDSEANSDEKGIAMNKHRRPHLLHHFLTSFPKQDHPKAKLDRLATKEQTPPDAMALENSREIIPRQGSNTDILSEPAALSVISNMNNSPFDLCHVLLSLLEKVCKFDVTLNHNSPLAASVVPTLTEFLAGFGDCCSLSDNLESRVVSAGWTEEPVALIQRMLFRTVLHLLSVDVSTAEMMPENLRKNLTELLRAALKIRICLEKQPDPFAPRQKKTLQEVQEDFVFSKYRHRALLLPELLEGVLQILICCLQSAASNPFYFSQAMDLVQEFIQHHGFNLFETAVLQMEWLVLRDGVPPEASEHLKALINSVMKIMSTVKKVKSEQLHHSMCTRKRHRRCEYSHFMHHHRDLSGLLVSAFKNQVSKNPFEETADGDVYYPERCCCIAVCAHQCLRLLQQASLSSTCVQILSGVHNIGICCCMDPKSVIIPLLHAFKLPALKNFQQHILNILNKLILDQLGGAEISPKIKKAACNICTVDSDQLAQLEETLQGNLCDAELSSSLSSPSYRFQGILPSSGSEDLLWKWDALKAYQNFVFEEDRLHSIQIANHICNLIQKGNIVVQWKLYNYIFNPVLQRGVELAHHCQHLSVTSAQSHVCSHHNQCLPQDVLQIYVKTLPILLKSRVIRDLFLSCNGVSQIIELNCLNGIRSHSLKAFETLIISLGEQQKDASVPDIDGIDIEQKELSSVHVGTSFHHQQAYSDSPQSLSKFYAGLKEAYPKRRKTVNQDVHINTINLFLCVAFLCVSKEAESDRESANDSEDTSGYDSTASEPLSHMLPCISLESLVLPSPEHMHQAADIWSMCRWIYMLSSVFQKQFYRLGGFRVCHKLIFMIIQKLFRSHKEEQGKKEGDTSVNENQDLNRISQPKRTMKEDLLSLAIKSDPIPSELGSLKKSADSLGKLELQHISSINVEEVSATEAAPEEAKLFTSQESETSLQSIRLLEALLAICLHGARTSQQKMELELPNQNLSVESILFEMRDHLSQSKVIETQLAKPLFDALLRVALGNYSADFEHNDAMTEKSHQSAEELSSQPGDFSEEAEDSQCCSFKLLVEEEGYEADSESNPEDGETQDDGVDLKSETEGFSASSSPNDLLENLTQGEIIYPEICMLELNLLSASKAKLDVLAHVFESFLKIIRQKEKNVFLLMQQGTVKNLLGGFLSILTQDDSDFQACQRVLVDLLVSLMSSRTCSEELTLLLRIFLEKSPCTKILLLGILKIIESDTTMSPSQYLTFPLLHAPNLSNGVSSQKYPGILNSKAMGLLRRARVSRSKKEADRESFPHRLLSSWHIAPVHLPLLGQNCWPHLSEGFSVSLWFNVECIHEAESTTEKGKKIKKRNKSLILPDSSFDGTESDRPEGAEYINPGERLIEEGCIHIISLGSKALMIQVWADPHNATLIFRVCMDSNDDMKAVLLAQVESQENIFLPSKWQHLVLTYLQQPQGKRRIHGKISIWVSGQRKPDVTLDFMLPRKTSLSSDSNKTFCMIGHCLSSQEEFLQLAGKWDLGNLLLFNGAKVGSQEAFYLYACGPNHTSVMPCKYGKPVNDYSKYINKEILRCEQIRELFMTKKDVDIGLLIESLSVVYTTYCPAQYTIYEPVIRLKGQMKTQLSQRPFSSKEVQSILLEPHHLKNLQPTEYKTIQGILHEIGGTGIFVFLFARVVELSSCEETQALALRVILSLIKYNQQRVHELENCNGLSMIHQVLIKQKCIVGFYILKTLLEGCCGEDIIYMNENGEFKLDVDSNAIIQDVKLLEELLLDWKIWSKAEQGVWETLLAALEVLIRADHHQQMFNIKQLLKAQVVHHFLLTCQVLQEYKEGQLTPMPREVCRSFVKIIAEVLGSPPDLELLTIIFNFLLAVHPPTNTYVCHNPTNFYFSLHIDGKIFQEKVRSIMYLRHSSSGGRSLMSPGFMVISPSGFTASPYEGENSSNIIPQQMAAHMLRSRSLPAFPTSSLLTQSQKLTGSLGCSIDRLQNIADTYVATQSKKQNSLGSSDTLKKGKEDAFISSCESAKTVCEMEAVLSAQVSVSDVPKGVLGFPVVKADHKQLGAEPRSEDDSPGDESCPRRPDYLKGLASFQRSHSTIASLGLAFPSQNGSAAVGRWPSLVDRNTDDWENFAYSLGYEPNYNRTASAHSVTEDCLVPICCGLYELLSGVLLILPDVLLEDVMDKLIQADTLLVLVNHPSPAIQQGVIKLLDAYFARASKEQKDKFLKNRGFSLLANQLYLHRGTQELLECFIEMFFGRHIGLDEEFDLEDVRNMGLFQKWSVIPILGLIETSLYDNILLHNALLLLLQILNSCSKVADMLLDNGLLYVLCNTVAALNGLEKNIPMSEYKLLACDIQQLFIAVTIHACSSSGSQYFRVIEDLIVMLGYLQNSKNKRTQNMAVALQLRVLQAAMEFIRTTANHDSENLTDSLQSPSAPHHAVVQKRKSIAGPRKFPLAQTESLLMKMRSVANDELHVMMQRRMSQENPSQATETELAQRLQRLTVLAVNRIIYQEFNSDIIDILRTPENVTQSKTSVFQTEISEENIHHEQSSVFNPFQKEIFTYLVEGFKVSIGSSKASGSKQQWTKILWSCKETFRMQLGRLLVHILSPAHAAQERKQIFEIVHEPNHQEILRDCLSPSLQHGAKLVLYLSELIHNHQGELTEEELGTAELLMNALKLCGHKCIPPSASTKADLIKMIKEEQKKYETEEGVNKAAWQKTVNNNQQSLFQRLDSKSKDISKIAADITQAVSLSQGNERKKVIQHIRGMYKVDLSASRHWQELIQQLTHDRAVWYDPIYYPTSWQLDPTEGPNRERRRLQRCYLTIPNKYLLRDRQKSEDVVKPPLSYLFEDKTHSSFSSTVKDKAASESIRVNRRCISVAPSRETAGELLLGKCGMYFVEDNASDTVESSSLQGELEPASFSWTYEEIKEVHKRWWQLRDNAVEIFLTNGRTLLLAFDNTKVRDDVYHNILTNNLPNLLEYGNITALTNLWYTGQITNFEYLTHLNKHAGRSFNDLMQYPVFPFILADYVSETLDLNDLLIYRNLSKPIAVQYKEKEDRYVDTYKYLEEEYRKGAREDDPMPPVQPYHYGSHYSNSGTVLHFLVRMPPFTKMFLAYQDQSFDIPDRTFHSTNTTWRLSSFESMTDVKELIPEFFYLPEFLVNREGFDFGVRQNGERVNHVNLPPWARNDPRLFILIHRQALESDYVSQNICQWIDLVFGYKQKGKASVQAINVFHPATYFGMDVSAVEDPVQRRALETMIKTYGQTPRQLFHMAHVSRPGAKLNIEGELPAAVGLLVQFAFRETREQVKEITYPSPLSWIKGLKWGEYVGSPSAPVPVVCFSQPHGERFGSLQALPTRAICGLSRNFCLLMTYSKEQGVRSMNSTDIQWSAILSWGYADNILRLKSKQSEPPVNFIQSSQQYQVTSCAWVPDSCQLFTGSKCGVITAYTNRFTSSTPSEIEMETQIHLYGHTEEITSLFVCKPYSILISVSRDGTCIIWDLNRLCYVQSLAGHKSPVTAVSASETSGDIATVCDSAGGGSDLRLWTVNGDLVGHVHCREIICSVAFSNQPEGVSINVIAGGLENGIVRLWSTWDLKPVREITFPKSNKPIISLTFSCDGHHLYTANSDGTVIAWCRKDQQRLKQPMFYSFLSSYAAG

SEQ ID NO: 775 - protein, 1016 aa, Homo sapiens
MVLPTCPMAEFALPRHSAVMERLRRRIELCRRHHSTCEARYEAVSPERLELERQHTFALHQRCIQAKAKRAGKHRQPPAATAPAPAAPAPRLDAADGPEHGRPATHLHDTVKRNLDSATSPQNGDQQNGYGDLFPGHKKTRREAPLGVAISSNGLPPASPLGQSDKPSGADALQSSGKHSLGLDSLNKKRLADSSLHLNGGSNPSESFPLSLNKELKQEPVEDLPCMITGTVGSISQSNLMPDLNLNEQEWKELIEELNRSVPDEDMKDLFNEDFEEKKDPESSGSATQTPLAQDINIKTEFSPAAFEQEQLGSPQVRAGSAGQTFLGPSSAPVSTDSPSLGGSQTLFHTSGQPRADNPSPNLMPASAQAQNAQRALAGVVLPSQGPGGASELSSAHQLQQIAAKQKREQMLQNPQQATPAPAPGQMSTWQQTGPSHSSLDVPYPMEKPASPSSYKQDFTNSKLLMMPSVNKSSPRPGGPYLQPSHVNLLSHQPPSNLNQNSANNQGSVLDYGNTKPLSHYKADCGQGSPGSGQSKPALMAYLPQQLSHISHEQNSLFLMKPKPGNMPFRSLVPPGQEQNPSSVPVQAQATSVGTQPPAVSVASSHNSSPYLSSQQQAAVMKQHQLLLDQQKQREQQQKHLQQQQFLQRQQHLLAEQEKQQFQRHLTRPPPQYQDPTQGSFPQQVGQFTGSSAAVPGMNTLGPSNSSCPRVFPQAGNLMPMGPGHASVSSLPTNSGQQDRGVAQFPGSQNMPQSSLYGMASGITQIVAQPPPQATNGHAHIPRQTNVGQNTSVSAAYGQNSLGSSGLSQQHNKGTLNPGLTKPPVPRVSPAMGGQNSSWQHQGMPNLSGQTPGNSNVSPFTAASSFHMQQQAHLKMSSPQFSQAVPNRPMAPMSSAAAVGSLLPPVSAQQRTSAPAPAPPPTAPQQGLPGLSPAGPELGAFSQSPASQMGGRAGLHCTQAYPVRTAGQELPFAYSGQPGGSGLSSVAGHTDLIDSLLKNRTSEEWMSDLDDLLGSQ

SEQ ID NO: 776 - protein, 431 aa, Homo sapiens
MFFGGEGSLTYTLVIICFLTLRLSASQNCLKKSLEDVVIDIQSSLSKGIRGNEPVYTSTQEDCINSCCSTKNISGDKACNLMIFDTRKTARQPNCYLFFCPNEEACPLKPAKGLMSYRIITDFPSLTRNLPSQELPQEDSLLHGQFSQAVTPLAHHHTDYSKPTDISWRDTLSQKFGSSDHLEKLFKMDEASAQLLAYKEKGHSQSSQFSSDQEIAHLLPENVSALPATVAVASPHTTSATPKPATLLPTNASVTPSGTSQPQLATTAPPVTTVTSQPPTTLISTVFTRAAATLQAMATTAVLTTTFQAPTDSKGSLETIPFTEISNLTLNTGNVYNPTALSMSNVESSTMNKTASWEGREASPGSSSQGSVPENQYGLPFEKWLLIGSLLFGVLFLVIGLVLLGRILSESLRRKRYSRLDYLINGIYVDI

SEQ ID NO: 777 - protein, 125 aa, Homo sapiens
MPSEKTFKQRRTFEQRVEDVRLIREQHPTKIPVIIERYKGEKQLPVLDKTKFLVPDHVNMSELIKIIRRRLQLNANQAFFLLVNGHSMVSVSTPISEVYESEKDEDGFLYMVYASQETFGMKLSV

SEQ ID NO: 778 - protein, 847 aa, Homo sapiens
MEPLKSLFLKSPLGSWNGSGSGGGGGGGGGRPEGSPKAAGYANPVWTALFDYEPSGQDELALRKGDRVEVLSRDAAISGDEGWWAGQVGGQVGIFPSNYVSRGGGPPPCEVASFQELRLEEVIGIGGFGKVYRGSWRGELVAVKAARQDPDEDISVTAESVRQEARLFAMLAHPNIIALKAVCLEEPNLCLVMEYAAGGPLSRALAGRRVPPHVLVNWAVQIARGMHYLHCEALVPVIHRDLKSNNILLLQPIESDDMEHKTLKITDFGLAREWHKTTQMSAAGTYAWMAPEVIKASTFSKGSDVWSFGVLLWELLTGEVPYRGIDCLAVAYGVAVNKLTLPIPSTCPEPFAQLMADCWAQDPHRRPDFASILQQLEALEAQVLREMPRDSFHSMQEGWKREIQGLFDELRAKEKELLSREEELTRAAREQRSQAEQLRRREHLLAQWELEVFERELTLLLQQVDRERPHVRRRRGTFKRSKLRARDGGERISMPLDFKHRITVQASPGLDRRRNVFEVGPGDSPTFPRFRAIQLEPAEPGQAWGRQSPRRLEDSSNGERRACWAWGPSSPKPGEAQNGRRRSRMDEATWYLDSDDSSPLGSPSTPPALNGNPPRPSLEPEEPKRPVPAERGSSSGTPKLIQRALLRGTALLASLGLGRDLQPPGGPGRERGESPTTPPTPTPAPCPTEPPPSPLICFSLKTPDSPPTPAPLLLDLGIPVGQRSAKSPRREEEPRGGTVSPPPGTSRSAPGTPGTPRSPPLGLISRPRPSPLRSRIDPWSFVSAGPRPSPLPSPQPAPRRAPWTLFPDSDPFWDSPPANPFQGGPQDCRAQTKDMGAQAPWVPEAGP

SEQ ID NO: 779 - protein, 626 aa, Homo sapiens
MDEQEALNSIMNDLVALQMNRRHRMPGYETMKNKDTGHSNRQSDVRIKFEHNGERRIIAFSRPVKYEDVEHKVTTVFGQPLDLHYMNNELSILLKNQDDLDKAIDILDRSSSMKSLRILLLSQDRNHNSSSPHSGVSRQVRIKASQSAGDINTIYQPPEPRSRHLSVSSQNPGRSSPPPGYVPERQQHIARQGSYTSINSEGEFIPETSEQCMLDPLSSAENSLSGSCQSLDRSADSPSFRKSRMSRAQSFPDNRQEYSDRETQLYDKGVKGGTYPRRYHVSVHHKDYSDGRRTFPRIRRHQGNLFTLVPSSRSLSTNGENMGLAVQYLDPRGRLRSADSENALSVQERNVPTKSPSAPINWRRGKLLGQGAFGRVYLCYDVDTGRELASKQVQFDPDSPETSKEVSALECEIQLLKNLQHERIVQYYGCLRDRAEKTLTIFMEYMPGGSVKDQLKAYGALTESVTRKYTRQILEGMSYLHSNMIVHRDIKGANILRDSAGNVKLGDFGASKRLQTICMSGTGMRSVTGTPYWMSPEVISGEGYGRKADVWSLGCTVVEMLTEKPPWAEYEAMAAIFKIATQPTNPQLPSHISEHGRDFLRRIFVEARQRPSAEELLTHHFAQLMY

SEQ ID NO: 780 - protein, 1374 aa, Homo sapiens
MSTEADEGITFSVPPFAPSGFCTIPEGGICRRGGAAAVGEGEEHQLPPPPPGSFWNVESAAAPGIGCPAATSSSSATRGRGSSVGGGSRRTTVAYVINEASQGQLVVAESEALQSLREACETVGATLETLHFGKLDFGETTVLDRFYNADIAVVEMSDAFRQPSLFYHLGVRESFSMANNIILYCDTNSDSLQSLKEIICQKNTMCTGNYTFVPYMITPHNKVYCCDSSFMKGLTELMQPNFELLLGPICLPLVDRFIQLLKVAQASSSQYFRESILNDIRKARNLYTGKELAAELARIRQRVDNIEVLTADIVINLLLSYRDIQDYDSIVKLVETLEKLPTFDLASHHHVKFHYAFALNRRNLPGDRAKALDIMIPMVQSEGQVASDMYCLVGRIYKDMFLDSNFTDTESRDHGASWFKKAFESEPTLQSGINYAVLLLAAGHQFESSFELRKVGVKLSSLLGKKGNLEKLQSYWEVGFFLGASVLANDHMRVIQASEKLFKLKTPAWYLKSIVETILIYKHFVKLTTEQPVAKQELVDFWMDFLVEATKTDVTVVRFPVLILEPTKIYQPSYLSINNEVEEKTISIWHVLPDDKKGIHEWNFSASSVRGVSISKFEERCCFLYVLHNSDDFQIYFCTELHCKKFFEMVNTITEEKGRSTEEGDCESDLLEYDYEYDENGDRVVLGKGTYGIVYAGRDLSNQVRIAIKEIPERDSRYSQPLHEEIALHKHLKHKNIVQYLGSFSENGFIKIFMEQVPGGSLSALLRSKWGPLKDNEQTIGFYTKQILEGLKYLHDNQIVHRDIKGDNVLINTYSGVLKISDFGTSKRLAGINPCTETFTGTLQYMAPEIIDKGPRGYGKAADIWSLGCTIIEMATGKPPFYELGEPQAAMFKVGMFKVHPEIPESMSAEAKAFILKCFEPDPDKRACANDLLVDEFLKVSSKKKKTQPKLSALSAGSNEYLRSISLPVPVLVEDTSSSSEYGSVSPDTELKVDPFSFKTRAKSCGERDVKGIRTLFLGIPDENFEDHSAPPSPEEKDSGFFMLRKDSERRATLHRILTEDQDKIVRNLMESLAQGAEEPKLKWEHITTLIASLREFVRSTDRKIIATTLSKLKLELDFDSHGISQVQVVLFGFQDAVNKVLRNHNIKPHWMFALDSIIRKAVQTAITILVPELRPHFSLASESDTADQEDLDVEDDHEEQPSNQTVRRPQAVIEDAVATSGVSTLSSTVSHDSQSAHRSLNVQLGRMKIETNRLLEELVRKEKELQALLHRAIEEKDQEIKHLKLKSQPIEIPELPVFHLNSSGTNTEDSELTDWLRVNGADEDTISRFLAEDYTLLDVLYYVTRDDLKCLRLRGGMLCTLWKAIIDFRNKQT

SEQ ID NO: 781 - protein, 1165 aa, Homo sapiens [sequence omitted]

SEQ ID NO: 782 - protein, 360 aa, Homo sapiens [sequence omitted]

SEQ ID NO: 783 - protein, 360 aa, Homo sapiens
MSQERPTFYRQELNKTIWEVPERYQNLSPVGSGAYGSVCAAFDTKTGLRVAVKKLSRPFQSIIHAKRTYRELRLLKHMKHENVIGLLDVFTPARSLEEFNDVYLVTHLMGADLNNIVKCQKLTDDHVQFLIYQILRGLKYIHSADIIHRDLKPSNLAVNEDCELKILDFGLARHTDDEMTGYVATRWYRAPEIMLNWMHYNQTVDIWSVGCIMAELLTGRTLFPGTDHINQLQQIMRLTGTPPAYLINRMPSHEARNYIQSLTQMPKMNFANVFIGANPLAVDLLEKMLVLDSDKRITAAQALAHAYFAQYHDPDDEPVADPYDQSFESRDLLIDEWKSLTYDEVISFVPPPLDQEEMES

SEQ ID NO: 784 - protein, 327 aa, Homo sapiens
MPGPTQTLSPNGENNNDIIQDNNGTIIPFRKHTVRGERSYSWGMAVNVYSTSITQETMSRHDIIAWVNDIVSLNYTKVEQLCSGAAYCQFMDMLFPGCISLKKVKFQAKLEHEYIHNFKLLQASFKRMNVDKVIPVEKLVKGRFQDNLDFIQWFKKFYDANYDGKEYDPVEARQGQDAIPPPDPGEQIFNLPKKSHHANSPTAGAAKSSPAAKPGSTPSRPSSAKRASSSGSASKSDKDLETQVIQLNEQVHSLKLALEGVEKERDFYFGKLREIELLCQEHGQENDDLVQRLMDILYASEEHEGHTEEPEAEEQAHEQQPPQQEEY

SEQ ID NO: 785 - protein, 704 aa, Homo sapiens
MESKPSRIPRRISVQPSSSLSARMMSGSRGSSLNDTYHSRDSSFRLDSEYQSTSASASASPFQSAWYSESEITQGARSRSQNQQRDHDSKRPKLSCTNCTTSAGRNVGNGLNTLSDSSWRHSQVPRSSSMVLGSFGTDLMRERRDLERRTDSSISNLMDYSHRSGDFTTSSYVQDRVPSYSQGARPKENSMSTLQLNTSSTNHQLPSEHQTILSSRDSRNSLRSNFSSRESESSRSNTQPGFSYSSSRDEAPIISNSERVVSSQRPFQESSDNEGRRTTRRLLSRIASSMSSTFFSRRSSQDSLNTRSLNSENSYVSPRILTASQSRSNVPSASEVPDNRASEASQGFRFLRRRWGLSSLSHNHSSESDSENFNQESEGRNTGPWLSSSLRNRCTPLFSRRRREGRDESSRIPTSDTSSRSHIFRRESNEVVHLEAQNDPLGAAANRPQASAASSSATTGGSTSDSAQGGRNTGISGILPGSLFRFAVPPALGSNLTDNVMITVDIIPSGWNSADGKSDKTKSAPSRDPERLQKIKESLLLEDSEEEEGDLCRICQMAAASSSNLLIEPCKCTGSLQYVHQDCMKKWLQAKINSGSSLEAVTTCELCKEKLELNLEDFDIHELHRAHANEQAEYEFISSGLYLVVLLHLCEQSFSDMMGNTNEPSTRVRFINLARTLQAHMEDLETSEDDSEEDGDHNRTFDIA

SEQ ID NO: 786 - protein, 291 aa, Homo sapiens
MSMPLHQISAIPSQDAISARVYRSKTKEKEREEQNEKTLGHFMSHSSNISKAGSPPSASAPAPVSSFSRTSITPSSQDICRICHCEGDDESPLITPCHCTGSLHFVHQACLQQWIKSSDTRCCELCKYEFIMETKLKPLRKWEKLQMTSSERRKIMCSVTFHVIAITCVVWSLYVLIDRTAEEIKQGQATGILEWPFWTKLVVVAIGFTGGLLFMYVQCKVYVQLWKRLKAYNRVIYVQNCPETSKKNIFEKSPLTEPNFENKHGYGICHSDTNSSCCTEPEDTGAEIIHV

SEQ ID NO: 787 - protein, 729 aa, Homo sapiens
MSTRTPLPTVNERDTENHTSHGDGRQEVTSRTSRSGARCRNSIASCADEQPHIGNYRLLKTIGKGNFAKVKLARHILTGREVAIKIIDKTQLNPTSLQKLFREVRIMKILNHPNIVKLFEVIETEKTLYLIMEYASGGEVFDYLVAHGRMKEKEARSKFRQIVSAVQYCHQKRIVHRDLKAENLLLDADMNIKIADFGFSNEFTVGGKLDTFCGSPPYAAPELFQGKKYDGPEVDVWSLGVILYTLVSGSLPFDGQNLKELRERVLRGKYRIPFYMSTDCENLLKRFLVLNPIKRGTLEQIMKDRWINAGHEEDELKPFVEPELDISDQKRIDIMVGMGYSQEEIQESLSKMKYDEITATYLLLGRKSSELDASDSSSSSNLSLAKVRPSSDLNNSTGQSPHHKVQRSVSSSQKQRRYSDHAGPAIPSVVAYPKRSQTSTADSDLKEDGISSRKSSGSAVGGKGIAPASPMLGNASNPNKADIPERKKSSTVPSSNTASGGMTRRNTYVCSERTTADRHSVIQNGKENSTIPDQRTPVASTHSISSAATPDRIRFPRGTASRSTFHGQPRERRTATYNGPPASPSLSHEATPLSQTRSRGSTNLFSKLTSKLTRSRNVSAEQKDENKEAKPRSLRFTWSMKTTSSMDPGDMMREIRKVLDANNCDYEQRERFLLFCVHGDGHAENLVQWEMEVCKLPRLSLNGVRFKRISGTSIAFKNIASKIANELKL

SEQ ID NO: 788 - protein, 1309 aa, Homo sapiens
MDESSLLRRRGLQKELSLPRRGRGCRSGNRKSLVVGTPSPTLSRPLSPLSVPTAGSSPLDSPRNFSAASALNFPFARRADGRRWSLASLPSSGYGTNTPSSTLSSSSSSRERLHQLPFQPTPDELHFLSKHFRSSENVLDEEGGRSPRLRPRSRSLSPGRATGTFDNEIVMMNHVYRERFPKATAQMEGRLQEFLTAYAPGARLALADGVLGFIHHQIVELARDCLAKSGENLVTSRYFLEMQEKLERLLQDAHERSDSEEVSFIVQLVRKLLIIISRPARLLECLEFDPEEFYHLLEAAEGHAREGQGIKTDLPQYIIGQLGLAKDPLEEMVPLSHLEEEQPPAPESPESRALVGQSRRKPCESDFETIKLISNGAYGAVYLVRHRDTRQRFAIKKINKQNLILRNQIQQVFVERDILTFAENPFVVSMFCSFETRRHLCMVMEYVEGGDCATLLKNMGPLPVDMARLYFAETVLALEYLHNYGIVHRDLKPDNLLITSLGHIKLTDFGLSKIGLMSMATNLYEGHIEKDAREFIDKQVCGTPEYIAPEVIFRQGYGKPVDWWAMGVVLYEFLVGCVPFFGDTPEELFGQVVSDEIMWPEGDEALPADAQDLITRLLRQSPLDRLGTGGTHEVKQHPFFLALDWAGLLRHKAEFVPQLEAEDDTSYFDTRSERYRHLGSEDDETNDEESSTEIPQFSSCSHRFSKVYSSSEFLAVQPTPTFAERSFSEDREEGWERSEVDYGRRLSADIRLRSWTSSGSSCQSSSSQPERGPSPSLLNTISLDTMPKFAFSSEDEGVGPGPAGPKRPVFILGEPDPPPAATPVMPKPSSLSADTAALSHARLRSNSIGARHSTPRPLDAGRGRRLGGPRDPAPEKSRASSSGGSGGGSGGRVPKSASVSALSLIITADDGSGGPLMSPLSPRSLSSNPSSRDSSPSRDPSPVCGSLRPPIVIHSSGKKYGFSLRAIRVYMGDSDVYTVHHVVWSVEDGSPAQEAGLRAGDLITHINGESVLGLVHMDVVELLLKSGNKISLRTTALENTSIKVGPARKNVAKGRMARRSKRSRRRETQDRRKSLFKKISKQTSVLHTSRSFSSGLHHSLSSSESLPGSPTHSLSPSPTTPCRSPAPDVPADTTASPPSASPSSSSPASPAAAGHTRPSSLHGLAAKLGPPRPKTGRRKSTSSIPPSPLACPPISAPPPRSPSPLPGHPPAPARSPRLRRGQSADKLGTGERLDGEAGRRTRGPEAELVVMRRLHLSERRDSFKKQEAVQEVSFDEPQEEATGLPTSVPQIAVEGEEAVPVALGPTGRD

SEQ ID NO: 789 - protein, 160 aa, Homo sapiens
MSDNDDIEVESDEEQPRFQSAADKRAHHNALERKRRDHIKDSFHSLRDSVPSLQGEKASRAQILDKATEYIQYMRRKNHTHQQDIDDLKRQNALLEQQVRALEKARSSAQLQTNYPSSDNSLYTNAKGSTISAFDGGSDSSSESEPEEPQSRKKLRMEAS

SEQ ID NO: 790 - protein, 186 aa, Homo sapiens
MASQKRPSQRHGSKYLATASTMDHARHGFLPRHRDTGILDSIGRFFGGDRGAPKRGSGKVPWLKPGRSPLPSHARSQPGLCNMYKDSHHPARTAHYGSLPQKSHGRTQDENPVVHFFKNIVTPRTPPPSQGKGAEGQRPGFGYGGRASDYKSAHKGFKGVDAQGTLSKIFKLGGRDSRSGSPMARR

SEQ ID NO: 791 - protein, 878 aa, Homo sapiens
MDLDKPSVWGSLKQRTRPLLINLSKKKVKKNPSKPPDLRARHHLDRRLSLSVPDLLEAEALAPEGRPYSGPQSSYTSVPSSLSTAGIFPKSSSSSLKQSEEELDWSQEEASHLHVVETDSEEAYASPAERRRVSSNGIFDLQKTSLGGDAPEEPEKLCGSSDLNASMTSQHFEEQSVPGEASDGLSNLPSPFAYLLTIHLKEGRNLVVRDRCGTSDPYVKFKLNGKTLYKSKVIYKNLNPVWDEIVVLPIQSLDQKLRVKVYDRDLTTSDFMGSAFVILSDLELNRTTEHILKLEDPNSLEDDMGVIVLNLNLVVKQGDFKRHRWSNRKRLSASKSSLIRNLRLSESLKKNQLWNGIISITLLEGKNVSGGSMTEMFVQLKLGDQRYKSKTLCKSANPQWQEQFDFHYFSDRMGILDIEVWGKDNKKHEERLGTCKVDISALPLKQANCLELPLDSCLGALLMLVTLTPCAGVSVSDLCVCPLADLSERKQITQRYCLQNSLKDVKDVGILQVKVLKAADLLAADFSGKSDPFCLLELGNDRLQTHTVYKNLNPEWNKVFTFPIKDIHDVLEVTVFDEDGDKPPDFLGKVAIPLLSIRDGQPNCYVLKNKDLEQAFKGVIYLEMDLIYNPVKASIRTFTPREKRFVEDSRKLSKKILSRDVDRVKRITMAIWNTMQFLKSCFQWESTLRSTIAFAVFLITVWNFELYMIPLALLLIFVYNFIRPVKGKVSSIQDSQESTDIDDEEDEDDKESEKKGLIERIYMVQDIVSTVQNVLEEIASFGERIKNTFNWTVPFLSSLACLILAAATIILYFIPLRYIILIWGINKFTKKLRNPYSIDNNELLDFLSRVPSDVQKVQYAELKLCSSHSPLRKKRSAL

SEQ ID NO: 792 - protein, 2174 aa, Homo sapiens
MSASFVPNGASLEDCHCNLFCLADLTGIKWKKYVWQGPTSAPILFPVTEEDPILSSFSRCLKADVLGVWRRDQRPGRRELWIFWWGEDPSFADLIHHDLSEEEDGVWENGLSYECRTLLFKAVHNLLERCLMNRNFVRIGKWFVKPYEKDEKPINKSEHLSCSFTFFLHGDSNVCTSVEINQHQPVYLLSEEHITLAQQSNSPFQVILCPFGLNGTLTGQAFKMSDSATKKLIGEWKQFYPISCCLKEMSEEKQEDMDWEDDSLAAVEVLVAGVRMIYPACFVLVPQSDIPTPSPVGSTHCSSSCLGVHQVPASTRDPAMSSVTLTPPTSPEEVQTVDPQSVQKWVKFSSVSDGFNSDSTSHHGGKIPRKLANHVVDRVWQECNMNRAQNKRKYSASSGGLCEEATAAKVASWDFVEATQRTNCSCLRHKNLKSRNAGQQGQAPSLGQQQQILPKHKTNEKQEKSEKPQKRPLTPFHHRVSVSDDVGMDADSASQRLVISAPDSQVRFSNIRTNDVAKTPQMHGTEMANSPQPPPLSPHPCDVVDEGVTKTPSTPQSQHFYQMPTPDPLVPSKPMEDRIDSLSQSFPPQYQEAVEPTVYVGTAVNLEEDEANIAWKYYKFPKKKDVEFLPPQLPSDKFKDDPVGPFGQESVTSVTELMVQCKKPLKVSDELVQQYQIKNQCLSAIASDAEQEPKIDPYAFVEGDEEFLFPDKKDRQNSEREAGKKHKVEDGTSSVTVLSHEEDAMSLFSPSIKQDAPRPTSHARPPSTSLIYDSDLAVSYTDLDNLFNSDEDELTPGSKKSANGSDDKASCKESKTGNLDPLSCISTADLHKMYPTPPSLEQHIMGFSPMNMNNKEYGSMDTTPGGTVLEGNSSSIGAQFKIEVDEGFCSPKPSEIKDFSYVYKPENCQILVGCSMFAPLKTLPSQYLPPIKLPEECIYRQSWTVGKLELLSSGPSMPFIKEGDGSNMDQEYGTAYTPQTHTSFGMPPSSAPPSNSGAGILPSPSTPRFPTPRTPRTPRTPRGAGGPASAQGSVKYENSDLYSPASTPSTCRPLNSVEPATVPSIPEAHSLYVNLILSESVMNLFKDCNFDSCCICVCNMNIKGADVGVYIPDPTQEAQYRCTCGFSAVMNRKFGNNSGLFLEDELDIIGRNTDCGKEAEKRFEALRATSAEHVNGGLKESEKLSDDLILLLQDQCTNLFSPFGAADQDPFPKSGVISNWVRVEERDCCNDCYLALEHGRQFMDNMSGGKVDEALVKSSCLHPWSKRNDVSMQCSQDILRMLLSLQPVLQDAIQKKRTVRPWGVQGPLTWQQFHKMAGRGSYGTDESPEPLPIPTFLLGYDYDYLVLSPFALPYWERLMLEPYGSQRDIAYVVLCPENEALLNGAKSFFRDLTAIYESCRLGQHRPVSRLLTDGIMRVGSTASKKLSEKLVAEWFSQAADGNNEAFSKLKLYAQVCRYDLGPYLASLPLDSSLLSQPNLVAPTSQSLITPPQMTNTGNANTPSATLASAASSTMTVTSGVAISTSVATANSTLTTASTSSSSSSNLNSGVSSNKLPSFPPFGSMNSNAAGSMSTQANTVQSGQLGGQQTSALQTAGISGESSSLPTQPHPDVSESTMDRDKVGIPTDGDSHAVTYPPAIVVYIIDPFTYENTDESTNSSSVWTLGLLRCFLEMVQTLPPHIKSTVSVQIIPCQYLLQPVKHEDREIYPQHLKSLAFSAFTQCRRPLPTSTNVKTLTGFGPGLAMETALRSPDRPECIRLYAPPFILAPVKDKQTELGETFGEAGQKYNVLFVGYCLSHDQRWILASCTDLYGELLETCIINIDVPNRARRKKSSARKFGLQKLWEWCLGLVQMSSLPWRVVIGRLGRIGHGELKDWSCLLSRRNLQSLSKRLKDMCRMCGISAADSPSILSACLVAMEPQGSFVIMPDSVSTGSVFGRSTTLNMQTSQLNTPQDTSCTHILVFPTSASVQVASATYTTENLDLAFNPNNDGADGMGIFDLLDTGDDLDPDIINILPASPTGSPVHSPGSHYPHGGDAGKGQSTDRLLSTEPHEEVPNILQQPLALGYFVSTAKAGPLPDWFWSACPQAQYQCPLFLKASLHLHVPSVQSDELLHSKHSHPLDSNQTSDVLRFVLEQYNALSWLTCDPATQDRRSCLPIHFVVLNQLYNFIMNML

SEQ ID NO: 793 - protein, 499 aa, Homo sapiens
MGRKKIQITRIMDERNRQVTFTKRKFGLMKKAYELSVLCDCEIALIIFNSSNKLFQYASTDMDKVLLKYTEYNEPHESRTNSDIVEALNKKEHRGCDSPDPDTSYVLTPHTEEKYKKINEEFDNMMRNHKIAPGLPPQNFSMSVTVPVTSPNALSYTNPGSSLVSPSLAASSTLTDSSMLSPPQTTLHRNVSPGAPQRPPSTGNAGGMLSTTDLTVPNGAGSSPVGNGFVNSRASPNLIGATGANSLGKVMPTKSPPPPGGGNLGMNSRKPDLRVVIPPSSKGMMPPLNTQRISSSQATQPLATPVVSVTTPSLPPQGLVYSAMPTAYNTDYSLTSADLSALQGFNSPGMLSLGQVSAWQQHHLGQAALSSLVAGGQLSQGSNLSINTNQNISIKSEPISPPRDRMTPSGFQQQQQQQQQQQPPPPPQPQPQPPQPQPRQEMGRSPVDSLSSSSSSYDGSDREDPRGDFHSPIVLGRPPNTEDRESPSVKRMRMDAWVT

SEQ ID NO: 794 - protein, 580 aa, Homo sapiens
MSDTWSSIQAHKKQLDSLRERLQRRRKQDSGHLDLRNPEAALSPTFRSDSPVPTAPTSGGPKPSTASAVPELATDPELEKKLLHHLSDLALTLPTDAVSICLAISTPDAPATQDGVESLLQKFAAQELIEVKRGLLQDDAHPTLVTYADHSKLSAMMGAVAEKKGPGEVAGTVTGQKRRAEQDSTTVAAFASSLVSGLNSSASEPAKEPAKKSRKHAASDVDLEIESLLNQQSTKEQQSKKVSQEILELLNTTTAKEQSIVEKFRSRGRAQVQEFCDYGTKEECMKASDADRPCRKLHFRRIINKHTDESLGDCSFLNTCFHMDTCKYVHYEIDACMDSEAPGSKDHTPSQELALTQSVGGDSSADRLFPPQWICCDIRYLDVSILGKFAVVMADPPWDIHMELPYGTLTDDEMRRLNIPVLQDDGFLFLWVTGRAMELGRECLNLWGYERVDEIIWVKTNQLQRIIRTGRTGHWLNHGKEHCLVGVKGNPQGFNQGLDCDVIVAEVRSTSHKPDEIYGMIERLSPGTRKIELFGRPHNVQPNWITLGNQLDGIHLLDPDVVARFKQRYPDGIISKPKNL

SEQ ID NO: 795 - protein, 735 aa, Homo sapiens
MAAGGAVAAAPECRLLPYALHKWSSFSSTYLPENILVDKPNDQSSRWSSESNYPPQYLILKLERPAIVQNITFGKYEKTHVCNLKKFKVFGGMNEENMTELLSSGLKNDYNKETFTLKHKIDEQMFPCRFIKIVPLLSWGPSFNFSIWYVELSGIDDPDIVQPCLNWYSKYREQEAIRLCLKHFRQHNYTEAFESLQKKTKIALEHPMLTDIHDKLVLKGDFDACEELIEKAVNDGLFNQYISQQEYKPRWSQIIPKSTKGDGEDNRPGMRGGHQMVIDVQTETVYLFGGWDGTQDLADFWAYSVKENQWTCISRDTEKENGPSARSCHKMCIDIQRRQIYTLGRYLDSSVRNSKSLKSDFYRYDIDTNTWMLLSEDTAADGGPKLVFDHQMCMDSEKHMIYTFGGRILTCNGSVDDSRASEPQFSGLFAFNCQCQTWKLLREDSCNAGPEDIQSRIGHCMLFHSKNRCLYVFGGQRSKTYLNDFFSYDVDSDHVDIISDGTKKDSGMVPMTGFTQRATIDPELNEIHVLSGLSKDKEKREENVRNSFWIYDIVRNSWSCVYKNDQAAKDNPTKSLQEEEPCPRFAHQLVYDELHKVHYLFGGNPGKSCSPKMRLDDFWSLKLCRPSKDYLLRHCKYLIRKHRFEEKAQVDPLSALKYLQNDLYITVDHSDPEETKEFQLLASALFKSGSDFTALGFSDVDHTYAQRTQLFDTLVNFFPDSMTPPKGNLVDLITL

SEQ ID NO: 796 - protein, 482 aa, Homo sapiens
MAEAATPGTTATTSGAGAAAATAAAASPTPIPTVTAPSLGAGGGGGGSDGSGGGWTKQVTCRYFMHGVCKEGDNCRYSHDLSDSPYSVVCKYFQRGYCIYGDRCRYEHSKPLKQEEATATELTTKSSLAASSSLSSIVGPLVEMNTGEAESRNSNFATVGAGSEDWVNAIEFVPGQPYCGRTAPSCTEAPLQGSVTKEESEKEQTAVETKKQLCPYAAVGECRYGENCVYLHGDSCDMCGLQVLHPMDAAQRSQHIKSCIEAHEKDMELSFAVQRSKDMVCGICMEVVYEKANPSERRFGILSNCNHTYCLKCIRKWRSAKQFESKIIKSCPECRITSNFVIPSEYWVEEKEEKQKLILKYKEAMSNKACRYFDEGRGSCPFGGNCFYKHAYPDGRREEPQRQKVGTSSRYRAQRRNHFWELIEERENSNPFDNDEEEVVTFELGEMLLMLLAAGGDDELTDSEDEWDLFHDELEDFYDLDL

SEQ ID NO: 797 - protein, 562 aa, Homo sapiens
MRLRLRLLALLLLLLAPPARAPKPSAQDVSLGVDWLTRYGYLPPPHPAQAQLQSPEKLRDAIKVMQRFAGLPETGRMDPGTVATMRKPRCSLPDVLGVAGLVRRRRRYALSGSVWKKRTLTWRVRSFPQSSQLSQETVRVLMSYALMAWGMESGLTFHEVDSPQGQEPDILIDFARAFHQDSYPFDGLGGTLAHAFFPGEHPISGDTHFDDEETWTFGSKDGEGTDLFAVAVHEFGHALGLGHSSAPNSIMRPFYQGPVGDPDKYRLSQDDRDGLQQLYGKAPQTPYDKPTRKPLAPPPQPPASPTHSPSFPIPDRCEGNFDAIANIRGETFFFKGPWFWRLQPSGQLVSPRPARLHRFWEGLPAQVRVVQAAYARHRDGRILLFSGPQFWVFQDRQLEGGARPLTELGLPPGEEVDAVFSWPQNGKTYLVRGRQYWRYDEAAARPDPGYPRDLSLWEGAPPSPDDVTVSNAGDTYFFKGAHYWRFPKNSIKTEPDAPQPMGPNWLDCPAPSSGPRAPRPPKATPVSETCDCQCELNQAAGRWPAPIPLLLLPLLVGGVASR

SEQ ID NO: 798 - protein, 939 aa, Homo sapiens
MAAQPPRGIRLSALCPKFLHTNSTSHTWPFSAVAELIDNAYDPDVNAKQIWIDKTVINDHICLTFTDNGNGMTSDKLHKMLSFGFSDKVTMNGHVPVGLYGNGFKSGSMRLGKDAIVFTKNGESMSVGLLSQTYLEVIKAEHVVVPIVAFNKHRQMINLAESKASLAAILEHSLFSTEQKLLAELDAIIGKKGTRIIIWNLRSYKNATEFDFEKDKYDIRIPEDLDEITGKKGYKKQERMDQIAPESDYSLRAYCSILYLKPRMQIILRGQKVKTQLVSKSLAYIERDVYRPKFLSKTVRITFGFNCRNKDHYGIMMYHRNRLIKAYEKVGCQLRANNMGVGVVGIIECNFLKPTHNKQDFDYTNEYRLTITALGEKLNDYWNEMKVKKNTEYPLNLPVEDIQKRPDQTWVQCDACLKWRKLPDGMDQLPEKWYCSNNPDPQFRNCEVPEEPEDEDLVHPTYEKTYKKTNKEKFRIRQPEMIPRINAELLFRPTALSTPSFSSPKESVPRRHLSEGTNSYATRLLNNHQVPPQSEPESNSLKRRLSTRSSILNAKNRRLSSQFENSVYKGDDDDEDVIILEENSTPKPAVDHDIDMKSEQSHVEQGGVQVEFVGDSEPCGQTGSTSTSSSRCDQGNTAATQTEVPSLVVKKEETVEDEIDVRNDAVILPSCVEAEAKIHETQETTDKSADDAGCQLQELRNQLLLVTEEKENYKRQCHMFTDQIKVLQQRILEMNDKYVKKETCHQSTETDAVFLLESINGKSESPDHMVSQYQQALEEIERLKKQCSALQHVKAECSQCSNNESKSEMDEMAVQLDDVFRQLDKCSIERDQYKSEVELLEMEKSQIRSQCEELKTEVEQLKSTNQQTATDVSTSSNIEESVNHMDGESLKLRSLRVNVGQLLAMIVPDLDLQQVNYDVDVVDEILGQVVEQMSEISST

SEQ ID NO: 799 - protein, 518 aa, Homo sapiens
MAENHAQNKAKLISETRRRFEAEYVTDKSDKYDARDVERLQQDDNWVESYLSWRHNIVDETLKMLDESFQWRKEISVNDLNESSIPRWLLEIGVIYLHGYDKEGNKLFWIRVKYHVKDQKTILDKKKLIAFWLERYAKRENGKPVTVMFDLSETGINSIDMDFVRFIINCFKVYYPKYLSKIVIFDMPWLMNAAFKIVKTWLGPEAVSLLKFTSKNEVQDYVSVEYLPPHMGGTDPFKYSYPPLVDDDFQTPLCENGPITSEDETSSKEDIESDGKETLETISNEEQTPLLKKINPTESTSKAEENEKVDSKVKAFKKPLSVFKGPLLHISPAEELYFGSTESGEKKTLIVLTNVTKNIVAFKVRTTAPEKYRVKPSNSSCDPGASVDIVVSPHGGLTVSAQDRFLIMAAEMEQSSGTGPAELTQFWKEVPRNKVMEHRLRCHTVESSKPNTLTLKDNAFNMSDKTSEDICLQLSRLLESNRKLEDQVQRCIWFQQLLLSLTMLLLAFVTSFFYLLYS

SEQ ID NO: 800 - protein, 396 aa, Homo sapiens
MAMIELGFGRQNFHPLKRKSSLLLKLIAVVFAVLLFCEFLIYYLAIFQCNWPEVKTTASDGEQTTREPVLKAMFLADTHLLGEFLGHWLDKLRREWQMERAFQTALWLLQPEVVFILGDIFDEGKWSTPEAWADDVERFQKMFRHPSHVQLKVVAGNHDIGFHYEMNTYKVERFEKVFSSERLFSWKGINFVMVNSVALNGDGCGICSETEAELIEVSHRLNCSREARGSSRCGPGPLLPTSAPVLLQHYPLYRRSDANCSGEDAAPAEERDIPFKENYDVLSREASQKLLWWLQPRLVLSGHTHSACEVHHGGRVPELSVPSFSWRNRNNPSFIMGSITPTDYTLSKCYLPREDVVLIIYCGVVGFLVVLTLTHFGLLASPFLSGLNLLGKRKTR

SEQ ID NO: 801 - protein, 351 aa, Homo sapiens
MERRMQLVKKDNEKERHKLFQGYETEEREETELSEKIKLECQPELSETSQTLPPKPFSCGRSGKGHKRKSPFGSTERKTPVKKLAPEFSKVKTKTPKHSPIKEEPCGSLSETVCKRELRSQETPEKPRSSVDTPPRLSTPQKGPSTHPKEKAFSSEIEDLPYLSTTEMYLCRWHQPPPSPLPLRESSPKKEETVARCLMPSSVAGETSVLAVPSWRDHSVEPLRDPNPSDLLENLDDSVFSKRHAKLELDEKRRKRWDIQRIREQRILQRLQLRMYKKKGIQESEPEVTSFFPEPDDVESLMITPFLPVVAFGRPLPKLTPQNFELPWLDERSRCRLEIQKKQTPHRTCRK

SEQ ID NO: 802 - protein, 1198 aa, Homo sapiens
MDEETRHSLECIQANQIFPRKQLIREDENLQVPFLELHGESTEFVGRAEDAIIALSNYRLHIKFKESLVNVPLQLIESVECRDIFQLHLTCKDCKVIRCQFSTFEQCQEWLKRLNNAIRPPAKIEDLFSFAYHAWCMEVYASEKEQHGDLCRPGEHVTSRFKNEVERMGFDMNNAWRISNINEKYKLCGSYPQELIVPAWITDKELESVSSFRSWKRIPAVIYRHQSNGAVIARCGQPEVSWWGWRNADDEHLVQSVAKACASDSRSSGSKLSTRNTSRDFPNGGDLSDVEFDSSLSNASGAESLAIQPQKLLILDARSYAAAVANRAKGGGCECPEYYPNCEVVFMGMANIHSIRRSFQSLRLLCTQMPDPGNWLSALESTKWLHHLSVLLKSALLVVHAVDQDQRPVLVHCSDGWDRTPQIVALAKLLLDPYYRTIEGFQVLVEMEWLDFGHKFADRCGHGENSDDLNERCPVFLQWLDCVHQLQRQFPCSFEFNEAFLVKLVQHTYSCLFGTFLCNNAKERGEKHTQERTCSVWSLLRAGNKAFKNLLYSSQSEAVLYPVCHVRNLMLWSAVYLPCPSPTTPVDDSCAPYPAPGTSPDDPPLSRLPKTRSYDNLTTACDNTVPLASRRCSDPSLNEKWQEHRRSLELSSLAGPGEDPLSADSLGKPTRVPGGAELSVAAGVAEGQMENILQEATKEESGVEEPAHRAGIEIQEGKEDPLLEKESRRKTPEASAIGLHQDPELGDAALRSHLDMSWPLFSQGISEQQSGLSVLLSSLQVPPRGEDSLEVPVEQFRIEEIAEGREEAVLPIPVDAKVGYGTSQSCSLLPSQVPFETRGPNVDSSTDMLVEDKVKSVSGPQGHHRSCLVNSGKDRLPQTMEPSPSETSLVERPQVGSVVHRTSLGSTLSLTRSPCALPLAECKEGLVCNGAPETENRASEQPPGLSTLQMYPTPNGHCANGEAGRSKDSLSRQLSAMSCSSAHLHSRNLHHKWLHSHSGRPSATSSPDQPSRSHLDDDGMSVYTDTIQQRLRQIESGHQQEVETLKKQVQELKSRLESQYLTSSLHFNGDFGDEVTSIPDSESNLDQNCLSRCSTEIFSEASWEQVDKQDTEMTRWLPDHLAAHCYACDSAFWLASRKHHCRNCGNVFCSSCCNQKVPVPSQQLFEPSRVCKSCYSSLHPTSSSIDLELDKPIAATSN

SEQ ID NO: 803 - protein, 662 aa, Homo sapiens
MVVSEVDIAKADPAAASHPLLLNGDATVAQKNPGSVAENNLCSQYEEKVRPCIDLIDSLRALGVEQDLALPAIAVIGDQSSGKSSVLEALSGVALPRGSGIVTRCPLVLKLKKLVNEDKWRGKVSYQDYEIEISDASEVEKEINKAQNAIAGEGMGISHELITLEISSRDVPDLTLIDLPGITRVAVGNQPADIGYKIKTLIKKYIQRQETISLVVVPSNVDIATTEALSMAQEVDPEGDRTIGILTKPDLVDKGTEDKVVDVVRNLVFHLKKGYMIVKCRGQQEIQDQLSLSEALQREKIFFENHPYFRDLLEEGKATVPCLAEKLTSELITHICKSLPLLENQIKETHQRITEELQKYGVDIPEDENEKMFFLIDKVNAFNQDITALMQGEETVGEEDIRLFTRLRHEFHKWSTIIENNFQEGHKILSRKIQKFENQYRGRELPGFVNYRTFETIVKQQIKALEEPAVDMLHTVTDMVRLAFTDVSIKNFEEFFNLHRTAKSKIEDIRAEQEREGEKLIRLHFQMEQIVYCQDQVYRGALQKVREKELEEEKKKKSWDFGAFQSSSATDSSMEEIFQHLMAYHQEASKRISSHIPLIIQFFMLQTYGQQLQKAMLQLLQDKDTYSWLLKERSDTSDKRKFLKERLARLTQARRRLAQFPG

SEQ ID NO: 804 - protein, 228 aa, Homo sapiens
MERVKMINVQRLLEAAEFLERRERECEHGYASSFPSMPSPRLQHSKPPRRLSRAQKHSSGSSNTSTANRSTHNELEKNRRAHLRLCLERLKVLIPLGPDCTRHTTLGLLNKAKAHIKKLEEAERKSQHQLENLEREQRFLKWRLEQLQGPQEMERIRMDSIGSTISSDRSDSEREEIEVDVESTEFSHGEVDNISTTSISDIDDHSSLPSIGSDEGYSSASVKLSFTS

SEQ ID NO: 805 - protein, 454 aa, Homo sapiens
LDFFRVVENQQPPATMPLNVSFTNRNYDLDYDSVQPYFYCDEEENFYQQQQQSELQPPAPSEDIWKKFELLPTPPLSPSRRSGLCSPSYVAVTPFSLRGDNDGGGGSFSTADQLEMVTELLGGDMVNQSFICDPDDETFIKNIIIQDCMWSGFSAAAKLVSEKLASYQAARKDSGSPNPARGHSVCSTSSLYLQDLSAAASECIDPSVVFPYPLNDSSSPKSCASQDSSAFSPSSDSLLSSTESSPQGSPEPLVLHEETPPTTSSDSEEEQEDEEEIDVVSVEKRQAPGKRSESGSPSAGGHSKPPHSPLVLKRCHVSTHQHNYAAPPSTRKDYPAAKRVKLDSVRVLRQISNNRKCTSPRSSDTEENVKRRTHNVLERQRRNELKRSFFALRDQIPELENNEKAPKVVILKKATAYILSVQAEEQKLISEEDLLRKRREQLKHKLEQLRNSCA

SEQ ID NO: 806 - protein, 896 aa, Homo sapiens
MAARAVLDEFTAPAEKAELLEQSRGRIEGLFGVSLAVLGALGAEEPLPARIWLQLCGAQEAVHSAKEYIKGICEPELEERECYPKDMHCIFVGAESLFLKSLIQDTCADLCILDIGLLGIRGSAEAVVMARSHIQQFVKLFENKENLPSSQKESEVKREFKQFVEAHADNYTMDLLILPTSLKKELLTLTQGEENLFETGDDEVIEMRDSQQTEFTQNAATGLNISRDETVLQEEARNKAGTPVSELTKQMDTVLSSSPDVLFDPINGLTPDEEALSNERICQKRRFSDSEERHTKKQFSLENVQEGEILHDAKTLAGNVIADLSDSSADSENLSPDIKETTEEMEYNILVNFFKTMGYSQEIVEKVIKVYGPSTEPLLLLEEIEKENKRFQEDREFSAGTVYPETNKTKNKGVYSSTNELTTDSTPKKTQAHTQQNMVEKFSQLPFKVEAKPCTSNCRINTFRTVPIEQKHEVWGSNQNYICNTDPETDGLSPSVASPSPKEVNFVSRGASSHQPRVPLFPENGLHQQPEPLLPNNMKSACEKRLGCCSSPHSKPNCSTLSPPMPLPQLLPSVTDARSAGPSDHIDSSVTGVQRFRDTLKIPYKLELKNEPGRTDLKHIVIDGSNVAITHGLKKFFSCRGIAIAVEYFWKLGNRNITVFVPQWRTRRDPNVTEQHFLTQLQELGILSLTPARMVFGERIASHDDRFLLHLADKTGGIIVTNDNFREFVNESVSWREIITKRLLQYTFVGDIFMVPDDPLGRSGPRLEEFLQKEVCLRDMQPLLSALPNVGMFDPSFRVPGTQAASTSHQPPTRIQGAPSSHWLPQQPHFPLLPALPSLQQNLPMPAQRSSAETNELREALLKIFPDSEQRLKIDQILVAHPYMKDLNALSAMVLD

SEQ ID NO: 807 - protein, 487 aa, Homo sapiens
MAAALPRTLGELQLYRILQKANLLSYFDAFIQQGGDDVQQLCEAGEEEFLEIMALVGMASKPLHVRRLQKALRDWVTNPGLFNQPLTSLPVSSIPIYKLPEGSPTWLGISCSSYERSSNAREPHLKIPKCAATTCVQSLGQGKSDVVGSLALQSVGESRLWQGHHATESEHSLSPADLGSPASPKESSEALDAAAALSVAECVERMAPTLPKSDLNEVKELLKTNKKLAKMIGHIFEMNDDDPHKEEEIRKYSAIYGRFDSKRKDGKHLTLHELTVNEAAAQLCVKDNALLTRRDELFALARQISREVTYKYTYRTTKSKCGERDELSPKRIKVEDGFPDFQDSVQTLFQQARAKSEELAALSSQQPEKVMAKQMEFLCNQAGYERLQHAERRLSAGLYRQSSEEHSPNGLTSDNSDGQGERPLNLRMPNLQNRQPHHFVVDGELSRLYPSEAKSHSSESLGILKDYPHSAFTLEKKVIKTEPEDSR

SEQ ID NO: 808 - protein, 215 aa, Homo sapiens
MPGEATETVPATEQELPQPQAETGSGTESDSDESVPELEEQDSTQATTQQAQLAAAAEIDEEPVSKAKQSRSEKKARKAMSKLGLRQVTGVTRVTIRKSKNILFVITKPDVYKSPASDTYIVFGEAKIEDLSQQAQLAAAEKFKVQGEAVSNIQENTQTPTVQEESEEEEVDETGVEVKDIELVMSQANVSRAKAVRALKNNSNDIVNAIMELTM

SEQ ID NO: 809 - protein, 156 aa, Homo sapiens
MSGGLLKALRSDSYVELSQYRDQHFRGDNEEQEKLLKKSCTLYVGNLSFYTTEEQIYELFSKSGDIKKIIMGLDKMKKTACGFCFVEYYSRADAENAMRYINGTRLDDRIIRTDWDAGFKEGRQYGRGRSGGQVRDEYRQDYDAGRGGYGKLAQNQ

SEQ ID NO: 810 - protein, 1441 aa, Homo sapiens
MSGLGDSSSDPANPDSHKRKGSPCDTLASSTEKRRREQENKYLEELAELLSANISDIDSLSVKPDKCKILKKTVDQIQLMKRMEQEKSTTDDDVQKSDISSSSQGVIEKESLGPLLLEALDGFFFVVNCEGRIVFVSENVTSYLGYNQEELMNTSVYSILHVGDHAEFVKNLLPKSLVNGVPWPQEATRRNSHTFNCRMLIHPPDEPGTENQEACQRYEVMQCFTVSQPKSIQEDGEDFQSCLICIARRLPRPPAITGVESFMTKQDTTGKIISIDTSSLRAAGRTGWEDLVRKCIYAFFQPQGREPSYARQLFQEVMTRGTASSPSYRFILNDGTMLSAHTKCKLCYPQSPDMQPFIMGIHIIDREHSGLSPQDDTNSGMSIPRVNPSVNPSISPAHGVARSSTLPPSNSNMVSTRINRQQSSDLHSSSHSNSSNSQGSFGCSPGSQIVANVALNQGQASSQSSNPSLNLNNSPMEGTGISLAQFMSPRRQVTSGLATRPRMPNNSFPPNISTLSSPVGMTSSACNNNNRSYSNIPVTSLQGMNEGPNNSVGFSASSPVLRQMSSQNSPSRLNIQPAKAESKDNKEIASILNEMIQSDNSSSDGKPLDSGLLHNNDRLSDGDSKYSQTSHKLVQLLTTTAEQQLRHADIDTSCKDVLSCTGTSNSASANSSGGSCPSSHSSLTERHKILHRLLQEGSPSDITTLSVEPDKKDSASTSVSVTGQVQGNSSIKLELDASKKKESKDHQLLRYLLDKDEKDLRSTPNLSLDDVKVKVEKKEQMDPCNTNPTPMTKPTPEEIKLEAQSQFTADLDQFDQLLPTLEKAAQLPGLCETDRMDGAVTSVTIKSEILPASLQSATARPTSRLNRLPELELEAIDNQFGQPGTGDQIPWTNNTVTAINQSKSEDQCISSQLDELLCPPTTVEGRNDEKALLEQLVSFLSGKDETELAELDRALGIDKLVQGGGLDVLSERFPPQQATPPLIMEERPNLYSQPYSSPSPTANLPSPFQGMVRQKPSLGTMPVQVTPPRGAFSPGMGMQPRQTLNRPPAAPNQLRLQLQQRLQGQQQLIHQNRQAILNQFAATAPVGINMRSGMQQQITPQPPLNAQMLAQRQRELYSQQHRQRQLIQQQRAMLMRQQSFGNNLPPSSGLPVQMGNPRLPQGAPQQFPYPPNYGTNPGTPPASTSPFSQLAANPEASLANRNSMVSRGMTGNIGGQFGTGINPQMQQNVFQYPGAGMVPQGEANFAPSLSPGSSMVPMPIPPPQSSLLQQTPPASGYQSPDMKAWQQGAIGNNNVFSQAVQNQPTPAQPGVYNNMSITVSMAGGNTNVQNMNPMMAQMQMSSLQMPGMNTVCPEQINDPALRHTGLYCNQLSSTDLLKTEADGTQQVQQVQVFADVQCTVNLVGGDPYLNQPGPLGTQKPTSGPQTPQAQQKSLLQQLLTE

SEQ ID NO: 811 - protein, 614 aa, Homo sapiens
MNTFQDQSGSSSNREPLLRCSDARRDLELAIGGVLRAEQQIKDNLREVKAQIHSCISRHLECLRSREVWLYEQVDLIYQLKEETLQQQAQQLYSLLGQFNCLTHQLECTQNKDLANQVSVCLERLGSLTLKPEDSTVLLFEADTITLRQTITTFGSLKTIQIPEHLMAHASSANIGPFLEKRGCISMPEQKSASGIVAVPFSEWLLGSKPASGYQAPYIPSTDPQDWLTQKQTLENSQTSSRACNFFNNVGGNLKGLENWLLKSEKSSYQKCNSHSTTSSFSIEMEKVGDQELPDQDEMDLSDWLVTPQESHKLRKPENGSRETSEKFKLLFQSYNVNDWLVKTDSCTNCQGNQPKGVEIENLGNLKCLNDHLEAKKPLSTPSMVTEDWLVQNHQDPCKVEEVCRANEPCTSFAECVCDENCEKEALYKWLLKKEGKDKNGMPVEPKPEPEKHKDSLNMWLCPRKEVIEQTKAPKAMTPSRIADSFQVIKNSPLSEWLIRPPYKEGSPKEVPGTEDRAGKQKFKSPMNTSWCSFNTADWVLPGKKMGNLSQLSSGEDKWLLRKKAQEVLLNSPLQEEHNFPPDHYGLPAVCDLFACMQLKVDKEKWLYRTPLQM

SEQ ID NO: 812 - protein, 335 aa, Homo sapiens
MEDSGKTFSSEEEEANYWKDLAMTYKQRAENTQEELREFQEGSREYEAELETQLQQIETRNRDLLSENNRLRMELETIKEKFEVQHSEGYRQISALEDDLAQTKAIKDQLQKYIRELEQANDDLERAKRATIMSLEDFEQRLNQAIERNAFLESELDEKENLLESVQRLKDEARDLRQELAVQQKQEKPRTPMPSSVEAERTDTAVQATGSVPSTPIAHRGPSSSLNTPGSFRRGLDDSTGGTPLTPAARISALNIVGDLLRKVGALESKLASCRNLVYDQSPNRTGGPASGRSSKNRDGGERRPSSTSVPLGDKGLDTSCRWLSKSTTRSSSSC

SEQ ID NO: 813 - protein, 345 aa, Homo sapiens
MDGEDIPDFSSLKEETAYWKELSLKYKQSFQEARDELVEFQEGSRELEAELEAQLVQAEQRNRDLQADNQRLKYEVEALKEKLEHQYAQSYKQVSVLEDDLSQTRAIKEQLHKYVRELEQANDDLERAKRATIVSLEDFEQRLNQAIERNAFLESELDEKESLLVSVQRLKDEARDLRQELAVRERQQEVTRKSAPSSPTLDCEKMDSAVQASLSLPATPVGKGTENTFPSPKAIPNGFGTSPLTPSARISALNIVGDLLRKVGALESKLAACRNFAKDQASRKSYISGNVNCGVLNGNGTKFSRSGHTSFFDKGAVNGFDPAPPPPGLGSSRPSSAPGMLPLSV

SEQ ID NO: 814 - protein, 221 aa, Homo sapiens
MALALAALAAVEPACGSRYQQLQNEEESGEPEQAAGDAPPPYSSISAESAAYFDYKDESGFPKPPSYNVATTLPSYDEAERTKAEATIPLVPGRDEDFVGRDDFDDADQLRIGNDGIFMLTFFMAFLFNWIGFFLSFCLTTSAAGRYGAISGFGLSLIKWILIVRFSTYFPGYFDGQYWLWWVFLVLGFLLFLRGFINYAKVRKMPETFSNLPRTRVLFIY

SEQ ID NO: 815 - protein, 263 aa, Homo sapiens
MEESGYESVLCVKPDVHVYRIPPRATNRGYRAAEWQLDQPSWSGRLRITAKGQMAYIKLEDRTSGELFAQAPVDQFPGTAVESVTDSSRYFVIRIEDGNGRRAFIGIGFGDRGDAFDFNVALQDHFKWVKQQCEFAKQAQNPDQGPKLDLGFKEGQTIKLNIANMKKKEGAAGNPRVRPASTGGLSLLPPPPGGKTSTLIPPPGEQLAVGGSLVQPAVAPSSGGAPVPWPQPNPATADIWGDFTKSTGSTSSQTQPGTGWVQF

SEQ ID NO: 816 - protein, 302 aa, Homo sapiens
MDEQSQGMQGPPVPQFQPQKALRPDMGYNTLANFRIEKKIGRGQFSEVYRAACLLDGVPVALKKVQIFDLMDAKARADCIKEIDLLKQLNHPNVIKYYASFIEDNELNIVLELADAGDLSRMIKHFKKQKRLIPERTVWKYFVQLCSALEHMHSRRVMHRDIKPANVFITATGVVKLGDLGLGRFFSSKTTAAHSLVGTPYYMSPERIHENGYNFKSDIWSLGCLLYEMAALQSPFYGDKMNLYSLCKKIEQCDYPPLPSDHYSEELRQLVNMCINPDPEKRPDVTYVYDVAKRMHACTASS

SEQ ID NO: 817 - protein, 969 aa, Homo sapiens
MAEDDPYLGRPEQMFHLDPSLTHTIFNPEVFQPQMALPTADGPYLQILEQPKQRGFRFRYVCEGPSHGGLPGASSEKNKKSYPQVKICNYVGPAKVIVQLVTNGKNIHLHAHSLVGKHCEDGICTVTAGPKDMVVGFANLGILHVTKKKVFETLEARMTEACIRGYNPGLLVHPDLAYLQAEGGGDRQLGDREKELIRQAALQQTKEMDLSVVRLMFTAFLPDSTGSFTRRLEPVVSDAIYDSKAPNASNLKIVRMDRTAGCVTGGEEIYLLCDKVQKDDIQIRFYEEEENGGVWEGFGDFSPTDVHRQFAIVFKTPKYKDINITKPASVFVQLRRKSDLETSEPKPFLYYPEIKDKEEVQRKRQKLMPNFSDSFGGGSGAGAGGGGMFGSGGGGGGTGSTGPGYSFPHYGFPTYGGITFHPGTTKSNAGMKHGTMDTESKKDPEGCDKSDDKNTVNLFGKVIETTEQDQEPSEATVGNGEVTLTYATGTKEESAGVQDNLFLEKAMQLAKRHANALFDYAVTGDVKMLLAVQRHLTAVQDENGDSVLHLAIIHLHSQLVRDLLEVTSGLISDDIINMRNDLYQTPLHLAVITKQEDVVEDLLRAGADLSLLDRLGNSVLHLAAKEGHDKVLSILLKHKKAALLLDHPNGDGLNAIHLAMMSNSLPCLLLLVAAGADVNAQEQKSGRTALHLAVEHDNISLAGCLLLEGDAHVDSTTYDGTTPLHIAAGRGSTRLAALLKAAGADPLVENFEPLYDLDDSWENAGEDEGVVPGTTPLDMATSWQVFDILNGKPYEPEFTSDDLLAQGDMKQLAEDVKLQLYKLLEIPDPDKNWATLAQKLGLGILNNAFRLSPAPSKTLMDNYEVSGGTVRELVEALRQMGYTEAIEVIQAASSPVKTTSQAHSLPLSPASTRQQIDELRDSDSVCDSGVETSFRKLSFTESLTSGASLLTLNKMPHDYGQEGPLEGKI

SEQ ID NO: 818 - protein, 347 aa, Homo sapiens
MEQYTANSNSSTEQIVVQAGQIQQQQQGGVTAVQLQTEAQVASASGQQVQTLQVVQGQPLMVQVSGGQLITSTGQPIMVQAVPGGQGQTIMQVPVSGTQGLQQIQLVPPGQIQIQGGQAVQVQGQQGQTQQIIIQQPQTAVTAGQTQTQQQIAVQGQQVAQTAEGQTIVYQPVNADGTILQQVTVPVSGMITIPAASLAGAQIVQTGANTNTTSSGQGTVTVTLPVAGNVVNSGGMVMMVPGAGSVPAIQRIPLPGAEMLEEEPLYVNAKQYHRILKRRQARAKLEAEGKIPKERRKYLHESRHRHAMARKRGEGGRFFSPKEKDSPHMQDPNQADEEAMTQIIRVS

SEQ ID NO: 819 - protein, 1429 aa, Homo sapiens; identical to SEQ ID NO: 147

SEQ ID NO: 820 - protein, 1040 aa, Homo sapiens
MGEEGGSASHDEEERASVLLGHSPGCEMCSQEAFQAQRSQLVELLVSGSLEGFESVLDWLLSWEVLSWEDYEGFHLLGQPLSHLARRLLDTVWNKGTWACQKLIAAAQEAQADSQSPKLHGCWDPHSLHPARDLQSHRPAIVRRLHSHVENMLDLAWERGFVSQYECDEIRLPIFTPSQRARRLLDLATVKANGLAAFLLQHVQELPVPLALPLEAATCKKYMAKLRTTVSAQSRFLSTYDGAETLCLEDIYTENVLEVWADVGMAGPPQKSPATLGLEELFSTPGHLNDDADTVLVVGEAGSGKSTLLQRLHLLWAAGQDFQEFLFVFPFSCRQLQCMAKPLSVRTLLFEHCCWPDVGQEDIFQLLLDHPDRVLLTFDGFDEFKFRFTDRERHCSPTDPTSVQTLLFNLLQGNLLKNARKVVTSRPAAVSAFLRKYIRTEFNLKGFSEQGIELYLRKRHHEPGVADRLIRLLQETSALHGLCHLPVFSWMVSKCHQELLLQEGGSPKTTTDMYLLILQHFLLHATPPDSASQGLGPSLLRGRLPTLLHLGRLALWGLGMCCYVFSAQQLQAAQVSPDDISLGFLVRAKGVVPGSTAPLEFLHITFQCFFAAFYLALSADVPPALLRHLFNCGRPGNSPMARLLPTMCIQASEGKDSSVAALLQKAEPHNLQITAAFLAGLLSREHWGLLAECQTSEKALLRRQACARWCLARSLRKHFHSIPPAAPGEAKSVHAMPGFIWLIRSLYEMQEERLARKAARGLNVGHLKLTFCSVGPTECAALAFVLQHLRRPVALQLDYNSVGDIGVEQLLPCLGVCKALYLRDNNISDRGICKLIECALHCEQLQKLALFNNKLTDGCAHSMAKLLACRQNFLALRLGNNYITAAGAQVLAEGLRGNTSLQFLGFWGNRVGDEGAQALAEALGDHQSLRWLSLVGNNIGSVGAQALALMLAKNVMLEELCLEENHLQDEGVCSLAEGLKKNSSLKILKLSNNCITYLGAEALLQALERNDTILEVWLRGNTFSLEEVDKLGCRDTRLLL

SEQ ID NO: 821 - protein, 301 aa, Homo sapiens
MTRHGKNCTAGAVYTYHEKKKDTAASGYGTQNIRLSRDAVKDFDCCCLSLQPCHDPVVTPDGYLYEREAILEYILHQKKEIARQMKAYEKQRGTRREEQKELQRAASQDHVRGFLEKESAIVSRPLNPFTAKALSGTSPDDVQPGPSVGPPSKDKDKVLPSFWIPSLTPEAKATKLEKPSRTVTCPMSGKPLRMSDLTPVHFTPLDSSVDRVGLITRSERYVCAVTRDSLSNATPCAVLRPSGAVVTLECVEKLIRKDMVDPVTGDKLTDRDIIVLQRGGTGFAGSGVKLQAEKSRPVMQA

SEQ ID NO: 822 - protein, 320 aa, Homo sapiens
MAFPKKKLQGLVAATITPMTENGEINFSVIGQYVDYLVKEQGVKNIFVNGTTGEGLSLSVSERRQVAEEWVTKGKDKLDQVIIHVGALSLKESQELAQHAAEIGADGIAVIAPFFLKPWTKDILINFLKEVAAAAPALPFYYYHIPALTGVKIRAEELLDGILDKIPTFQGLKFSDTDLLDFGQCVDQNRQQQFAFLFGVDEQLLSALVMGATGAVGSTYNYLGKKTNQMLEAFEQKDFSLALNYQFCIQRFINFVVKLGFGVSQTKAIMTLVSGIPMGPPRLPLQKASREFTDSAEAKLKSLDFLSFTDLKDGNLEAGS

SEQ ID NO: 823 - protein, 777 aa, Homo sapiens
MDSKESLTPGREENPSSVLAQERGDVMDFYKTLRGGATVKVSASSPSLAVASQSDSKQRRLLVDFPKGSVSNAQQPDLSKAVSLSMGLYMGETETKVMGNDLGFPQQGQISLSSGETDLKLLEESIANLNRSTSVPENPKSSASTAVSAAPTEKEFPKTHSDVSSEQQHLKGQTGTNGGNVKLYTTDQSTFDILQDLEFSSGSPGKETNESPWRSDLLIDENCLLSPLAGEDDSFLLEGNSNEDCKPLILPDTKPKIKDNGDLVLSSPSNVTLPQVKTEKEDFIELCTPGVIKQEKLGTVYCQASFPGANIIGNKMSAISVHGVSTSGGQMYHYDMNTASLSQQQDQKPIFNVIPPIPVGSENWNRCQGSGDDNLTSLGTLNFPGRTVFSNGYSSPSMRPDVSSPPSSSSTATTGPPPKLCLVCSDEASGCHYGVLTCGSCKVFFKRAVEGQHNYLCAGRNDCIIDKIRRKNCPACRYRKCLQAGMNLEARKTKKKIKGIQQATTGVSQETSENPGNKTIVPATLPQLTPTLVSLLEVIEPEVLYAGYDSSVPDSTWRIMTTLNMLGGRQVIAAVKWAKAIPGFRNLHLDDQMTLLQYSWMFLMAFALGWRSYRQSSANLLCFAPDLIINEQRMTLPCMYDQCKHMLYVSSELHRLQVSYEEYLCMKTLLLLSSVPKDGLKSQELFDEIRMTYIKELGKAIVKREGNSSQNWQRFYQLTKLLDSMHEVVENLLNYCFQTFLDKTMSIEFPEMLAEIITNQIPKYSNGNIKKLLFHQK

SEQ ID NO: 824 - protein, 287 aa, Homo sapiens
MEVMEGPLNLAHQQSRRADRLLAAGKYEEAISCHKKAAAYLSEAMKLTQSEQAHLSLELQRDSHMKQLLLIQERWKRAQREERLKAQQNTDKDAAAHLQTSHKPSAEDAEGQSPLSQKYSPSTEKCLPEIQGIFDRDPDTLLYLLQQKSEPAEPCIGSKAPKDDKTIIEEQATKIADLKRHVEFLVAENERLRKENKQLKAEKARLLKGPIEKELDVDADFVETSELWSLPPHAETATASSTWQKFAANTGKAKDIPIPNLPPLDFPSPELPLMELSEDILKGFMNN

SEQ ID NO: 825 - protein, 340 aa, Homo sapiens
MLTQLKAKSEGKLAKQICKVVLDHFEKQYSKELGDAWNTVREILTSPSCWQYAVLLNRFNYPFELEKDLHLKGYHTLSQGSLPNYPKSVKCYLSRTPGRIPSERHQIGNLKKYYLLNAASLLPVLALELRDGEKVLDLCAAPGGKSIALLQCACPGYLHCNEYDSLRLRWLRQTLESFIPQPLINVIKVSELDGRKMGDAQPEMFDKVLVDAPCSNDRSWLFSSDSQKASCRISQRRNLPLLQIELLRSAIKALRPGGILVYSTCTLSKAENQDVISEILNSHGNIMPMDIKGIARTCSHDFTFAPTGQECGLLVIPDKGKAWGPMYVAKLKKSWSTGKW

SEQ ID NO: 826 - protein, 640 aa, Homo sapiens
MNKLRQSFRRKKDVYVPEASRPHQWQTDEEGVRTGKCSFPVKYLGHVEVDESRGMHICEDAVKRLKATGKKAVKAVLWVSADGLRVVDEKTKDLIVDQTIEKVSFCAPDRNFDRAFSYICRDGTTRRWICHCFMAVKDTGERLSHAVGCAFAACLERKQKREKECGVTATFDASRTTFTREGSFRVTTATEQAEREEIMKQMQDAKKAETDKIVVGSSVAPGNTAPSPSSPTSPTSDATTSLEMNNPHAIPRRHAPIEQLARQGSFRGFPALSQKMSPFKRQLSLRINELPSTMQRKTDFPIKNAVPEVEGEAESISSLCSQITNAFSTPEDPFSSAPMTKPVTVVAPQSPTFQANGTDSAFHVLAKPAHTALAPVAMPVRETNPWAHAPDAANKEIAATCSGTEWGQSSGAASPGLFQAGHRRTPSEADRWLEEVSKSVRAQQPQASAAPLQPVLQPPPPTAISQPASPFQGNAFLTSQPVPVGVVPALQPAFVPAQSYPVANGMPYPAPNVPVVGITPSQMVANVFGTAGHPQAAHPHQSPSLVRQQTFPHYEASSATTSPFFKPPAQHLNGSAAFNGVDDGRLASADRHTEVPTGTCPVDPFEAQWAALENKSKQRTNPSPTNPFSSDLQKTFEIEL

SEQ ID NO: 827 - protein, 687 aa, Homo sapiens
MGNGESQLSSVPAQKLGWFIQEYLKPYEECQTLIDEMVNTICDVLQEPEQFPLVQGVAIGGSYGRKTVLRGNSDGTLVLFFSDLKQFQDQKRSQRDILDKTGDKLKFCLFTKWLKNNFEIQKSLDGFTIQVFTKNQRISFEVLAAFNALSLNDNPSPWIYRELKRSLDKTNASPGEFAVCFTELQQKFFDNRPGKLKDLILLIKHWHQQCQKKIKDLPSLSPYALELLTVYAWEQGCRKDNFDIAEGVRTVLELIKCQEKLCIYWMVNYNFEDETIRNILLHQLQSARPVILDPVDPTNNVSGDKICWQWLKKEAQTWLTSPNLDNELPAPSWNVLPAPLFTTPGHLLDKFIKEFLQPNKCFLEQIDSAVNIIRTFLKENCFRQSTAKIQIVRGGSTAKGTALKTGSDADLVVFHNSLKSYTSQKNERHKIVKEIHEQLKAFWREKEEELEVSFEPPKWKAPRVLSFSLKSKVLNESVSFDVLPAFNALGQLSSGSTPSPEVYAGLIDLYKSSDLPGGEFSTCFTVLQRNFIRSRPTKLKDLIRLVKHWYKECERKLKPKGSLPPKYALELLTIYAWEQGSGVPDFDTAEGFRTVLELVTQYQQLCIFWKVNYNFEDETVRKFLLSQLQKTRPVILDPAEPTGDVGGGDRWCWHLLAKEAKEWLSSPCFKDGTGNPIPPWKVPVKVI

SEQ ID NO: 828 - protein, 514 aa, Homo sapiens
MALMQELYSTPASRLDSFVAQWLQPHREWKEEVLDAVRTVEEFLRQEHFQGKRGLDQDVRVLKVVKVGSFGNGTVLRSTREVELVAFLSCFHSFQEAAKHHKDVLRLIWKTMWQSQDLLDLGLEDLRMEQRVPDALVFTIQTRGTAEPITVTIVPAYRALGPSLPNSQPPPEVYVSLIKACGGPGNFCPSFSELQRNFVKHRPTKLKSLLRLVKHWYQQYVKARSPRANLPPLYALELLTIYAWEMGTEEDENFMLDEGFTTVMDLLLEYEVICIYWTKYYTLHNAIIEDCVRKQLKKERPIILDPADPTLNVAEGYRWDIVAQRASQCLKQDCCYDNRENPISSWNVKRARDIHLTVEQRGYPDFNLIVNPYEPIRKVKEKIRRTRGYSGLQRLSFQVPGSERQLLSSRCSLAKYGIFSHTHIYLLETIPSEIQVFVKNPDGGSYAYAINPNSFILGLKQQIEDQQGLPKKQQQLEFQGQVLQDWLGLGIYGIQDSDTLILSKKKGEALFPAS

SEQ ID NO: 829 - protein, 451 aa, Homo sapiens
MGNLLGGVSFREPTTVEDCDSTWQTDSEPEPEEPGPGGGSEGPGQESEQPAQPPEQAGGRPGASPAPDEDAEAAGAEQGGDSTEATAKPKRSFYAARDLYKYRHQYPNFKDIRYQNDLSNLRFYKNKIPFKPDGVYIEEVLSKWKGDYEKLEHNHTYIQWLFPLREQGLNFYAKELTTYEIEEFKKTKEAIRRFLLAYKMMLEFFGIKLTDKTGNVARAVNWQERFQHLNESQHNYLRITRILKSLGELGYESFKSPLVKFILHEALVENTIPNIKQSALEYFVYTIRDRRERRKLLRFAQKHYTPSENFIWGPPRKEQSEGSKAQKMSSPLASSHNSQTSMHKKAKDSKNSSSAVHLNSKTAEDKKVAPKEPVEETDRPSPEPSNEAAKPRNTEKDSNAENMNSQPEKTVTTPTEKKESVSPENNEEGGNDNQDNENPGNTNCHDVVLVQ

SEQ ID NO: 830 - protein, 747 aa, Homo sapiens
MQGGEPVSTMKVSESEGKLEGQATAVTPNKNSSCGGGISSSSSSRGGSAKGWQYSDHMENVYGYLMKYTNLVTGWQYRFFVLNNEAGLLEYFVNEQSRNQKPRGTLQLAGAVISPSDEDSHTFTVNAASGEQYKLRATDAKERQHWVSRLQICTQHHTEAIGKNNPPLKSRSFSLASSSNSPISQRRPSQNAISFFNVGHSKLQSLSKRTNLPPDHLVEVREMMSHAEGQQRDLIRRIECLPTSGHLSSLDQDLLMLKATSMATMNCLNDCFHILQLQHASHQKGSLPSGTTIEWLEPKISLSNHYKNGADQPFATDQSKPVAVPEEQPVAESGLLAREPEEINADDEIEDTCDHKEDDLGAVEEQRSVILHLLSQLKLGMDLTRVVLPTFILEKRSLLEMYADFMSHPDLFIAITNGATAEDRMIRFVEYYLTSFHEGRKGAIAKKPYNPIIGETFHCSWKMPKSEVASSVFSSSSTQGVTNHAPLSGESLTQVGSDCYTVRFVAEQVSHHPPVSGFYAECTERKMCVNAHVWTKSKFLGMSIGVTMVGEGILSLLEHGEEYTFSLPCAYARSILTVPWVELGGKVSVNCAKTGYSASITFHTKPFYGGKLHRVTAEVKHNITNTVVCRVQGEWNSVLEFTYSNGETKYVDLTKLAVTKKRVRPLEKQDPFESRRLWKNVTDSLRESEIDKATEHKHTLEERQRTEERHRTETGTPWKTKYFIKEGDGWVYHKPLWKIIPTTQPAE

SEQ ID NO: 831 - protein, 468 aa, Homo sapiens
MNGEEEFFDAVTEANQKVTGMIDLDTSKNNRIGKTGERPSQENGIQKHRTSLPAPMFSRSDFSVWTILKKCVGLELSKITMPIAFNEPLSFLQRITEYMEHVYLIHRASCQPQPLERMQSVAAFAVSAVASQWERTGKPFNPLLGETYELIREDLGFRFISEQVSHHPPISAFHSEGLNHDFLFHGSIYPKLKFWGKSVEAEPRGTITLELLKHNEAYTWTNPTCCVHNVIIGKLWIEQYGTVEILNHRTGHKCVLHFKPCGLFGKELHKVEGHIQDKNKKKLFMIYGKWTECLWGIDPVSYESFKKQERRGDHLRKAKLDEDSGKADSDVADDVPVAQETVQVIPGSKLLWRINTRPPNSAQMYNFTSFTVSLNELETGMEKTLPPTDCRLRPDIRGMENGNMDLASQEKERLEEKQREARRERAKEEAEWQTRWFYPGNNPYTGTPDWLYAGDYFERNFSDCPDIY

SEQ ID NO: 832 - protein, 486 aa, Homo sapiens
MSVTYDDSVGVEVSSDSFWEVGNYKRTVKRIDDGHRLCSDLMNCLHERARIEKAYAQQLTEWARRWRQLVEKGPQYGTVEKAWMAFMSEAERVSELHLEVKASLMNDDFEKIKNWQKEAFHKQMMGGFKETKEAEDGFRKAQKPWAKKLKEVEAAKKAHHAACKEEKLAISREANSKADPSLNPEQLKKLQDKIEKCKQDVLKTKEKYEKSLKELDQGTPQYMENMEQVFEQCQQFEEKRLRFFREVLLEVQKHLDLSNVAGYKAIYHDLEQSIRAADAVEDLRWFRANHGPGMAMNWPQFEEWSADLNRTLSRREKKKATDGVTLTGINQTGDQSLPSKPSSTLNVPSNPAQSAQSQSSYNPFEDEDDTGSTVSEKDDTKAKNVSSYEKTQSYPTDWSDDESNNPFSSTDANGDSNPFDDDATSGTEVRVRALYDYEGQEHDELSFKAGDELTKMEDEDEQGWCKGRLDNGQVGLYPANYVEAIQ

SEQ ID NO: 833 - protein, 410 aa, Homo sapiens
MVLSQRQRDELNRAIADYLRSNGYEEAYSVFKKEAELDVNEELDKKYAGLLEKKWTSVIRLQKKVMELESKLNEAKEEFTSGGPLGQKRDPKEWIPRPPEKYALSGHRSPVTRVIFHPVFSVMVSASEDATIKVWDYETGDFERTLKGHTDSVQDISFDHSGKLLASCSADMTIKLWDFQGFECIRTMHGHDHNVSSVAIMPNGDHIVSASRDKTIKMWEVQTGYCVKTFTGHREWVRMVRPNQDGTLIASCSNDQTVRVWVVATKECKAELREHEHVVECISWAPESSYSSISEATGSETKKSGKPGPFLLSGSRDKTIKMWDVSTGMCLMTLVGHDNWVRGVLFHSGGKFILSCADDKTLRVWDYKNKRCMKTLNAHEHFVTSLDFHKTAPYVVTGSVDQTVKVWECR

SEQ ID NO: 834 - protein, 701 aa, Homo sapiens
MAQAGVVGEVTQVLCAAGGALELPELRRRLRMGLSADALERLLRQRGRFVVAVRAGGAAAAPERVVLAASPLRLCRAHQGSKPGCVGLCAQLHLCRFMVYGACKFLRAGKNCRNSHSLTTEHNLSVLRTHGVDHLSYNELCQLLFQNDPWLLPEICQHYNKGDGPHGSCAFQKQCIKLHICQYFLQGECKFGTSCKRSHDFSNSENLEKLEKLGMSSDLVSRLPTIYRNAHDIKNKSSAPSRVPPLFVPQGTSERKDSSGSVSPNTLSQEEGDQICLYHIRKSCSFQDKCHRVHFHLPYRWQFLDRGKWEDLDNMELIEEAYCNPKIERILCSESASTFHSHCLNFNAMTYGATQARRLSTASSVTKPPHFILTTDWIWYWSDEFGSWQEYGRQGTVHPVTTVSSSDVEKAYLAYCTPGSDGQAATLKFQAGKHNYELDFKAFVQKNLVYGTTKKVCRRPKYVSPQDVTTMQTCNTKFPGPKSIPDYWDSSALPDPGFQKITLSSSSEEYQKVWNLFNRTLPFYFVQKIERVQNLALWEVYQWQKGQMQKQNGGKAVDERQLFHGTSAIFVDAICQQNFDWRVCGVHGTSYGKGSYFARDAAYSHHYSKSDTQTHTMFLARVLVGEFVRGNASFVRPPAKEGWSNAFYDSCVNSVSDPSIFVIFEKHQVYPEYVIQYTTSSKPSVTPSILLALGSLFSSRQ

SEQ ID NO: 835 - protein, 434 aa, Homo sapiens
MDDQSRMLQTLAGVNLAGHSVQGGMALPPPPHGHEGADGDGRKQDIGDILHQIMTITDQSLDEAQAKKHALNCHRMKPALFSVLCEIKEKTGLSIRGAQEEDPPDPQLMRLDNMLLAEGVSGPEKGGGSAAAAAAAAASGGSSDNSIEHSDYRAKLTQIRQIYHTELEKYEQACNEFTTHVMNLLREQSRTRPISPKEIERMVGIIHRKFSSIQMQLKQSTCEAVMILRSRFLDARRKRRNFSKQATEILNEYFYSHLSNPYPSEEAKEELAKKCSITVSQVSNWFGNKRIRYKKNIGKFQEEANLYAAKTAVTAAHAVAAAVQNNQTNSPTTPNSGSSGSFNLPNSGDMFMNMQSLNGDSYQGSQVGANVQSQVDTLRHVINQTGGYSDGLGGNSLYSPHNLNANGGWQDATTPSSVTSPTEGPGSVHSDTSN

SEQ ID NO: 836 - protein, 366 aa, Homo sapiens
MDTGVIEGGLNVTLTIRLLMHGKEVGSIIGKKGESVKKMREESGARINISEGNCPERIITLAGPTNAIFKAFAMIIDKLEEDISSSMTNSTAASRPPVTLRLVVPASQCGSLIGKGGCKIKEIRESTGAQVQVAGDMLPNSTERAITIAGIPQSIIECVKQICVVMLETLSQSPPKGVTIPYRPKPSSSPVIFAGGQDRYSTGSDSASFPHTTPSMCLNPDLEGPPLEAYTIQGQYAIPQPDLTKLHQLAMQQSHFPMTHGNTGFSGIESSSPEVKGYWAGLDASAQTTSHELTIPNDLIGCIIGRQGAKINEIRQMSGAQIKIANPVEGSTDRQVTITGSAASISLAQYLINVRLSSETGGMGSS

SEQ ID NO: 837 - protein, 1555 aa, Homo sapiens
MSEQTPAEAGAAGAREDACRDYQSSLEDLTFNSKPHINMLTILAEENLPFAKEIVSLIEAQTAKAPSSEKLPVMYLMDSIVKNVGREYLTAFTKNLVATFICVFEKVDENTRKSLFKLRSTWDEIFPLKKLYALDVRVNSLDPAWPIKPLPPNVNTSSIHVNPKFLNKSPEEPSTPGTVVSSPSISTPPIVPDIQKNLTQEQLIRQQLLAKQKQLLELQQKKLELELEQAKAQLAVSLSVQQETSNLGPGSAPSKLHVSQIPPMAVKAPHQVPVQSEKSRPGPSLQIQDLKGTNRDPRLNRISQHSHGKDQSHRKEFLMNTLNQSDTKTSKTIPSEKLNSSKQEKSKSGEKITKKELDQLDSKSKSKSKSPSPLKNKLSHTKDLKNQESESMRLSDMNKRDPRLKKHLQDKTDGKDDDVKEKRKTAEKKDKDEHMKSSEHRLAGSRNKIINGIVQKQDTITEESEKQGTKPGRSSTRKRSRSRSPKSRSPIIHSPKRRDRRSPKRRQRSMSPTSTPKAGKIRQSGAKQSHMEEFTPPSREDRNAKRSTKQDIRDPRRMKKTEEERPQETTNQHSTKSGTEPKENVENWQSSKSAKRWKSGWEENKSLQQVDEHSKPPHLRHRESWSSTKGILSPRAPKQQQHRLSVDANLQIPKELTLASKRELLQKTSERLASGEITQDDFLVVVHQIRQLFQYQEGVREEQRSPFNDRFPLKRPRYEDSDKPFVDSPASRFAGLDTNQRLTALAEDRPLFDGPSRPSVARDGPTKMIFEGPNKLSPRIDGPPTPASLRFDGSPGQMGGGGPLRFEGPQGQLGGGCPLRFEGPPGPVGTPLRFEGPIGQAGGGGFRFEGSPGLRFEGSPGGLRFEGPGGQPVGGLRFEGHRGQPVGGLRFEGPHGQPVGGLRFDNPRGQPVGGLRFEGGHGPSGAAIRFDGPHGQPGGGIRFEGPLLQQGVGMRFEGPHGQSVAGLRFEGQHNQLGGNLRFEGPHGQPGVGIRFEGPLVQQGGGMRFEGPSVPGGGLRIEGPLGQGGPRFEGCHALRFDGQPGQPSLLPRFDGLHGQPGPRFERTPGQPGPQRFDGPPGQQVQPRFDGVPQRFDGPQHQQASRFDIPLGLQGTRFDNHPSQRLESVSFNQTGPYNDPPGNAFNAPSQGLQFQRHEQIFDSPQGPNFNGPHGPGNQSFSNPLNRASGHYFDEKNLQSSQFGNFGNIPAPMTVGNIQASQQVLSGVAQPVAFGQGQQFLPVHPQNPGFVQNPSGALPKAYPDNHLSQVDVNELFSKLLKTGILKLSQTDSATTQVSEVTAQPPPEEEEDQNEDQDVPDLTNFTVEELKQRYDSVINRLYTGIQCYSCGMRFTTSQTDVYADHLDWHYRQNRTEKDVSRKVTHRRWYYSLTDWIEFEEIADLEERAKSQFFEKVHEEVVLKTQEAAKEKEFQSVPAGPAGAVESCEICQEQFEQYWDEEEEEWHLKNAIRVDGKIYHPSCYEDYQNTSSFDCTPSPSKTPVENPLNIMLNIVKNELQEPCDSPKVKEERIDTPPACTEESIATPSEIKTENDTVESV

SEQ ID NO: 838 - protein, 2341 aa, Homo sapiens
MGSQTLQILRQGVWAALSGGWYYDPHQATFVNALHLYLWLFLLGLPFTLYMALPSTMIIVAVYCPVIAAVFIVLKMVNYRLHRALDAGEVVDRTANEFTDQRTKAEQGNCSTRRKDSNGPSDPGGGIEMSEFIREATPPVGCSSRNSYAGLDPSNQIGSGSSRLGTAATIKGDTDTAKTSDDISLSLGQSSSLCKEGSEEQDLAADRKLFRLVSNDSFISIQPSLSSCGQDLPRDFSDKVNLPSHNHHHHVDQSLSSACDTEVASLVPLHSHSYRKDHRPRGVPRTSSSAVAFPDTSLNDFPLYQQRRGLDPVSELESSKPLSGSKESLVENSGLSGEFQLAGDLKINTSQPPTKSGKSKPLKAEKSMDSLRSLSTRSSGSTESYCSGTDRDTNSTVSSYKSEQTSSTHIESILSEHEESPKAGTKSGRKKECCAGPEEKNSCASDKRTSSEKIAMEASTNSGVHEAKDPTPSDEMHNQRGLSTSASEEANKNPHANEFTSQGDRPPGNTAENKEEKSDKSAVSVDSKVRKDVGGKQKEGDVRPKSSSVIHRTASAHKSGRRRTGKKRASSFDSSRHRDYVCFRGVSGTKPHSAIFCHDEDSSDQSDLSRASSVQSAHQFSSDSSSSTTSHSCQSPEGRYSALKTKHTHKERGTDSEHTHKAHLVPEGTSKKRATRRTSSTNSAKTRARVLSLDSGTVACLNDSNRLMAPESIKPLTTSKSDLEAKEGEVLDELSLLGRASQLETVTRSRNSLPNQVAFPEGEEQDAVSGAAQASEEAVSFRRERSTFRRQAVRRRHNAGSNPTPPTLLIGSPLSLQDGQQGQQSTAQVKVQSRPPSQAAVLSASASLLVRNGSVHLEASHDNASAVGGSSLHDELGKFSSTLYETGGCDMSLVNFEPAARRASNICDTDSHVSSSTSVRFYPHDVLSLPQIRLNRLLTIDTDLLEQQDIDLSPDLAATYGPTEEAAQKVKHYYRFWILPQLWIGINFDRLTLLALFDRNREILENVLAVILAILVAFLGSILLIQGFFRDIWVFQFCLVIASCQYSLLKSVQPDSSSPRHGHNRIIAYSRPVYFCICCGLIWLLDYGSRNLTATKFKLYGITFTNPLVFISARDLVIVFTLCFPIVFFIGLLPQVNTFVMYLCEQLDIHIFGGNATTSLLAALYSFICSIVAVALLYGLCYGALKDSWDGQHIPVLFSIFCGLLVAVSYHLSRQSSDPSVLFSLVQSKIFPKTEEKNPEDPLSEVKDPLPEKLRNSVSERLQSDLVVCIVIGVLYFAIHVSTVFTVLQPALKYVLYTLVGFVGFVTHYVLPQVRKQLPWHCFSHPLLKTLEYNQYEVRNAATMMWFEKLHVWLLFVEKNIIYPLIVLNELSSSAETIASPKKLNTELGALMITVAGLKLLRSSFSSPTYQYVTVIFTVLFFKFDYEAFSETMLLDLFFMSILFNKLWELLYKLQFVYTYIAPWQITWGSAFHAFAQPFAVPHSAMLFIQAAVSAFFSTPLNPFLGSAIFITSYVRPVKFWERDYNTKRVDHSNTRLASQLDRNPGSDDNNLNSIFYEHLTRSLQHSLCGDLLLGRWGNYSTGDCFILASDYLNALVHLIEIGNGLVTFQLRGLEFRGTYCQQREVEAITEGVEEDEGFCCCEPGHIPHMLSFNAAFSQRWLAWEVIVTKYILEGYSITDNSAASMLQVFDLRKVLTTYYVKGIIYYVTTSSKLEEWLANETMQEGLRLCADRNYVDVDPTFNPNIDEDYDHRLAGISRESFCVIYLNWIEYCSSRRAKPVDVDKDSSLVTLCYGLCVLGRRALGTASHHMSSNLESFLYGLHALFKGDFRISSIRDEWIFADMELLRKVVVPGIRMSIKLHQDHFTSPDEYDDPTVLYEAIVSHEKNLVIAHEGDPAWRSAVLANSPSLLALRHVMDDGTNEYKIIMLNRRYLSFRVIKVNKECVRGLWAGQQQELVFLRNRNPERGSIQNAKQALRNMINSSCDQPIGYPIFVSPLTTSYSDSHEQLKDILGGPISLGNIRNFIVSTWHRLRKGCGAGCNSGGNIEDSDTGGGTSCTGNNATTANNPHSNVTQGSIGNPGQGSGTGLHPPVTSYPPTLGTSHSSHSVQSGLVRQSPARASVASQSSYCYSSRHSSLRMSTTGFVPCRRSSTSQISLRNLPSSIQSRLSMVNQMEPSGQSGLACVQHGLPSSSSSSQSIPACKHHTLVGFLATEGGQSSATDAQPGNTLSPANNSHSRKAEVIYRVQIVDPSQILEGINLSKRKELQWPDEGIRLKAGRNSWKDWSPQEGMEGHVIHRWVPCSRDPGTRSHIDKAVLLVQIDDKYVTVIETGVLELGAEV

SEQ ID NO: 839 - protein, 868 aa, Homo sapiens
MATFISVQLKKTSEVDLAKPLVKFIQQTYPSGGEEQAQYCRAAEELSKLRRAAVGRPLDKHEGALETLLRYYDQICSIEPKFPFSENQICLTFTWKDAFDKGSLFGGSVKLALASLGYEKSCVLFNCAALASQIAAEQNLDNDEGLKIAAKHYQFASGAFLHIKETVLSALSREPTVDISPDTVGTLSLIMLAQAQEVFFLKATRDKMKDAIIAKLANQAADYFGDAFKQCQYKDTLPKEVFPVLAAKHCIMQANAEYHQSILAKQQKKFGEEIARLQHAAELIKTVASRYDEYVNVKDFSDKINRALAAAKKDNDFIYHDRVPDLKDLDPIGKATLVKSTPVNVPISQKFTDLFEKMVPVSVQQSLAAYNQRKADLVNRSIAQMREATTLANGVLASLNLPAAIEDVSGDTVPQSILTKSRSVIEQGGIQTVDQLIKELPELLQRNREILDESLRLLDEEEATDNDLRAKFKERWQRTPSNELYKPLRAEGTNFRTVLDKAVQADGQVKECYQSHRDTIVLLCKPEPELNAAIPSANPAKTMQGSEVVNVLKSLLSNLDEVKKEREGLENDLKSVNFDMTSKFLTALAQDGVINEEALSVTELDRVYGGLTTKVQESLKKQEGLLKNIQVSHQEFSKMKQSNNEANLREEVLKNLATAYDNFVELVANLKEGTKFYNELTEILVRFQNKCSDIVFARKTERDELLKDLQQSIAREPSAPSIPTPAYQSSPAGGHAPTPPTPAPRTMPPTKPQPPARPPPPVLPANRAPSATAPSPVGAGTAAPAPSQTPGSAPPPQAQGPPYPTYPGYPGYCQMPMPMGYNPYAYGQYNMPYPPVYHQSPGQAPYPGPQQPSYPFPQPPQQSYYPQQ

SEQ ID NO: 840 - protein, 1112 aa, Homo sapiens
MRRDERDAKAMRSLQPPDGAGSPPESLRNGYVKSCVSPLRQDPPRGFFFHLCRFCNVELRPPPASPQQPRRCSPFCRARLSLGALAAFVLALLLGAEPESWAAGAAWLRTLLSVCSHSLSPLFSIACAFFFLTCFLTRTKRGPGPGRSCGSWWLLALPACCYLGDFLVWQWWSWPWGDGDAGSAAPHTPPEAAAGRLLLVLSCVGLLLTLAHPLRLRHCVLVLLLASFVWWVSFTSLGSLPSALRPLLSGLVGGAGCLLALGLDHFFQIREAPLHPRLSSAAEEKVPVIRPRRRSSCVSLGETAASYYGSCKIFRRPSLPCISREQMILWDWDLKQWYKPHYQNSGGGNGVDLSVLNEARNMVSDLLTDPSLPPQVISSLRSISSLMGAFSGSCRPKINPLTPFPGFYPCSEIEDPAEKGDRKLNKGLNRNSLPTPQLRRSSGTSGLLPVEQSSRWDRNNGKRPHQEFGISSQGCYLNGPFNSNLLTIPKQRSSSVSLTHHVGLRRAGVLSSLSPVNSSNHGPVSTGSLTNRSPIEFPDTADFLNKPSVILQRSLGNAPNTPDFYQQLRNSDSNLCNSCGHQMLKYVSTSESDGTDCCSGKSGEEENIFSKESFKLMETQQEEETEKKDSRKLFQEGDKWLTEEAQSEQQTNIEQEVSLDLILVEEYDSLIEKMSNWNFPIFELVEKMGEKSGRILSQVMYTLFQDTGLLEIFKIPTQQFMNYFRALENGYRDIPYHNRIHATDVLHAVWYLTTRPVPGLQQIHNGCGTGNETDSDGRINHGRIAYISSKSCSNPDESYGCLSSNIPALELMALYVAAAMHDYDHPGRTNAFLVATNAPQAVLYNDRSVLENHHAASAWNLYLSRPEYNFLLHLDHVEFKRFRFLVIEAILATDLKKHFDFLAEFNAKANDVNSNGIEWSNENDRLLVCQVCIKLADINGPAKVRDLHLKWTEGIVNEFYEQGDEEANLGLPISPFMDRSSPQLAKLQESFITHIVGPLCNSYDAAGLLPGQWLEAEEDNDTESGDDEDGEELDTEDEEMENNLNPKPPRRKSRRRIFCQLMHHLTENHKIWKEIVEEEEKCKADGNKLQVENSSLPQADEIQVIEEADEEE

SEQ ID NO: 841 - protein, 738 aa, Homo sapiens
MQPRWAQGATMWLGVLLTLLLCSSLEGQENSFTINSVDMKSLPDWTVQNGKNLTLQCFADVSTTSHVKPQHQMLFYKDDVLFYNISSMKSTESYFIPEVRIYDSGTYKCTVIVNNKEKTTAEYQVLVEGVPSPRVTLDKKEAIQGGIVRVNCSVPEEKAPIHFTIEKLELNEKMVKLKREKNSRDQNFVILEFPVEEQDRVLSFRCQARIISGIHMQTSESTKSELVTVTESFSTPKFHISPTGMIMEGAQLHIKCTIQVTHLAQEFPEIIIQKDKAIVAHNRHGNKAVYSVMAMVEHSGNYTCKVESSRISKVSSIVVNITELFSKPELESSFTHLDQGERLNLSCSIPGAPPANFTIQKEDTIVSQTQDFTKIASKSDSGTYICTAGIDKVVKKSNTVQIVVCEMLSQPRISYDAQFEVIKGQTIEVRCESISGTLPISYQLLKTSKVLENSTKNSNDPAVFKDNPTEDVEYQCVADNCHSHAKMLSEVLRVKVIAPVDEVQISILSSKVVESGEDIVLQCAVNEGSGPITYKFYREKEGKPFYQMTSNATQAFWTKQKASKEQEGEYYCTAFNRANHASSVPRSKILTVRVILAPWKKGLIAVVIIGVIIALLIIAAKCYFLRKAKAKQMPVEMSRPAVPLLNSNNEKMSDPNMEANSHYGHNDDVRNHAMKPINDNKEPLNSDVQYTEVQVSSAESHKDLGKKDTETVYSEVRKAVPDAVESRYSRTEGSLDGT

SEQ ID NO: 842 - protein, 154 aa, Homo sapiens
MAQSINITELNLPQLEMLKNQLDQEVEFLSTSIAQLKVVQTKYVEAKDCLNVLNKSNEGKELLVPLTSSMYVPGKLHDVEHVLIDVGTGYYVEKTAEDAKDFFKRKIDFLTKQMEKIQPALQEKHAMKQAVMEMMSQKIQQLTALGAAQATAKA

SEQ ID NO: 843 - protein, 556 aa, Homo sapiens
MAVAAAAAAGPVFWRRLLGLLPGRPGLAALLGRLSDRLGRNRDRQRRRSPWLLLAPLLSPAVPQVTSPPCCLCPEGVHRFQWIRNLVPEFGVSSSHVRVLSSPAEFFELMKGQIRVAKRRVVMASLYLGTGPLEQELVDCLESTLEKSLQAKFPSNLKVSILLDFTRGSRGRKNSRTMLLPLLRRFPEQVRVSLFHTPHLRGLLRLLIPERFNETIGLQHIKVYLFDNSVILSGANLSDSYFTNRQDRYVFLQDCAEIADFFTELVDAVGDVSLQLQGDDTVQVVDGMVHPYKGDRAEYCKAANKRVMDVINSARTRQQMLHAQTFHSNSLLTQEDAAAAGDRRPAPDTWIYPLIQMKPFEIQIDEIVTETLLTEAERGAKVYLTTGYFNLTQAYMDLVLGTRAEYQILLASPEVNGFFGAKGVAGAIPAAYVHIERQFFSEVCSLGQQERVQLQEYWRRGWTFHAKGLWLYLAGSSLPCLTLIGSPNFGYRSVHRDLEAQIAIVTENQALQQQLHQEQEQLYLRSGVVSSATFEQPSRQVKLWVKMVTPLIKNFF

SEQ ID NO: 844 - protein, 323 aa, Homo sapiens
MTSGNGNSASSIAGTAPQNGENKPPQAIVKPQILTHVIEGFVIQEGAEPFPVGRSSLLVGNLKKKYAQGFLPEKLPQQDHTTTTDSEMEEPYLQESKEEGAPLKLKCELCGRVDFAYKFKRSKRFCSMACAKRYNVGCTKRVGLFHSDRSKLQKAGAATHNRRRASKASLPPLTKDTKKQPTGTVPLSVTAALQLTHSQEDSSRCSDNSSYEEPLSPISASSSTSRRRQGQRDLELPDMHMRDLVGMGHHFLPSEPTKWNVEDVYEFIRSLPGCQEIAEEFRAQEIDGQALLLLKEDHLMSAMNIKLGPALKIYARISMLKDS

SEQ ID NO: 845 - protein, 331 aa, Homo sapiens
MAQASPPRPERVLGASSPEARPAQEALLLPTGVFQVAEKMEKRTCALCPKDVEYNVLYFAQSENIAAHENCLLYSSGLVECEDQDPLNPDRSFDVESVKKEIQRGRKLKCKFCHKRGATVGCDLKNCNKNYHFFCAKKDDAVPQSDGVRGIYKLLCQQHAQFPIIAQSAKFSGVKRKRGRKKPLSGNHVQPPETMKCNTFIRQVKEEHGRHTDATVKVPFLKKCKEAGLLNYLLEEILDKVHSIPEKLMDETTSESDYEEIGSALFDCRLFEDTFVNFQAAIEKKIHASQQRWQQLKEEIELLQDLKQTLCSFQENRDLMSSSTSISSLSY

SEQ ID NO: 846 - protein, 1096 aa, Homo sapiens
MATVPVYCVCRLPYDVTRFMIECDACKDWFHGSCVGVEEEEAPDIDIYHCPNCEKTHGKSTLKKKRTWHKHGPGQAPDVKPVQNGSQLFIKELRSRTFPSAEDVVARVPGSQLTLGYMEEHGFTEPILVPKKDGLGLAVPAPTFYVSDVENYVGPERSVDVTDVTKQKDCKMKLKEFVDYYYSTNRKRVLNVTNLEFSDTRMSSFVEPPDIVKKLSWVENYWPDDALLAKPKVTKYCLICVKDSYTDFHIDSGGASAWYHVLKGEKTFYLIRPASANISLYERWRSASNHSEMFFADQVDKCYKCIVKQGQTLFIPSGWIYATLTPVDCLAFAGHFLHSLSVEMQMRAYEVERRLKLGSLTQFPNFETACWYMGKHLLEAFKGSHKSGKQLPPHLVQGAKILNGAFRSWTKKQALAEHEDELPEHFKPSQLIKDLAKEIRLSENASKAVRPEVNTVASSDEVCDGDREKEEPPSPIEATPPQSLLEKVSKKKTPKTVKMPKPSKIPKPPKPPKPPRPPKTLKLKDGGKKKGKKSRESASPTIPNLDLLEAHTKEALTKMEPPKKGKATKSVLSVPNKDVVHMQNDVERLEIREQTKSKSEAKWKYKNSKPDSLLKMEEEQKLEKSPLAGNKDNKFSFSFSNKKLLGSKALRPPTSPGVFGALQNFKEDKPKPVRDEYEYVSDDGELKIDEFPIRRKKNAPKRDLSFLLDKKAVLPTPVTKPKLDSAAYKSDDSSDEGSLHIDTDTKPGRNARVKKESGSSAAGILDLLQASEEVGALEYNPSSQPPASPSTQEAIQGMLSMANLQASDSCLQTTWGAGQAKGSSLAAHGARKNGGGSGKSAGKRLLKRAAKNSVDLDDYEEEQDHLDACFKDSDYVYPSLESDEDNPIFKSRSKKRKGSDDAPYSPTARVGPSVPRQDRPVREGTRVASIETGLAAAAAKLSQQEEQKSKKKKSAKRKLTPNTTSPSTSTSISAGTTSTSTTPASTTPASTTPASTSTASSQASQEGSSPEPPPESHSSSLADHEYTAAGTFTGAQAGRTSQPMAPGVFLTQRRPSASSPNNNTAAKGKRTKKGMATAKQRLGKILKIHRNGKLLL

SEQ ID NO: 847 - protein, 1012 aa, Homo sapiens
MTKHPPNRRGISFEVGAQLEARDRLKNWYPAHIEDIDYEEGKVLIHFKRWNHRYDEWFCWDSPYLRPLEKIQLRKEGLHEEDGSSEFQINEQVLACWSDCRFYPAKVTAVNKDGTYTVKFYDGVVQTVKHIHVKAFSKDQNIVGNARPKETDHKSLSSSPDKREKFKEQRKATVNVKKDKEDKPLKTEKRPKQPDKEGKLICSEKGKVSEKSLPKNEKEDKENISENDREYSGDAQVDKKPENDIVKSPQENLREPKRKRGRPPSIAPTAVDSNSQTLQPITLELRRRKISKGCEVPLKRPRLDKNSSQEKSKNYSENTDKDLSRRRSSRLSTNGTHEILDPDLVVSDLVDTDPLQDTLSSTKESEEGQLKSALEAGQVSSALTCHSFGDGSGAAGLELNCPSMGENTMKTEPTSPLVELQEISTVEVTNTFKKTDDFGSSNAPAVDLDHKFRCKVVDCLKFFRKAKLLHYHMKYFHGMEKSLEPEESPGKRHVQTRGPSASDKPSQETLTRKRVSASSPTTKDKEKNKEKKFKEFVRVKPKKKKKKKKKTKPECPCSEEISDTSQEPSPPKAFAVTRCGSSHKPGVHMSPQLHGPESGHHKGKVKALEEDNLSESSSESFLWSDDEYGQDVDVTTNPDEELDGDDRYDFEVVRCICEVQEENDFMIQCEECQCWQHGVCMGLLEENVPEKYTCYVCQDPPGQRPGFKYWYDKEWLSRGHMHGLAFLEENYSHQNAKKIVATHQLLGDVQRVIEVLHGLQLKMSILQSREHPDLPLWCQPWKQHSGEGRSHFRNIPVTDTRSKEEAPSYRTLNGAVEKPRPLALPLPRSVEESYITSEHCYQKPRAYYPAVEQKLVVETRGSALDDAVNPLHENGDDSLSPRLGWPLDQDRSKGDSDPKPGSPKVKEYVSKKALPEEAPARKLLDRGGEGLLSSQHQWQFNLLTHVESLQDEVTHRMDSIEKELDVLESWLDYTGELEPPEPLARLPQLKHCIKQLLMDLGKVQQIALCCST

SEQ ID NO: 848 - protein, 1017 aa, Homo sapiens
MSKKPPNRPGITFEIGARLEALDYLQKWYPSRIEKIDYEEGKMLVHFERWSHRYDEWIYWDSNRLRPLERPALRKEGLKDEEDFFDFKAGEEVLARWTDCRYYPAKIEAINKEGTFTVQFYDGVIRCLKRMHIKAMPEDAKGQVKSQHPLSWCCPIDPAGSCNQSMGSEDWIALVKAAAAAAAKNKTGSKPRTSANSNKDKDKDERKWFKVPSKKEETSTCIATPDVEKKEDLPTSSETFGLHVENVPKMVFPQPESTLSNKRKNNQGNSFQAKRARLNKITGLLASKAVGVDGAEKKEDYNETAPMLEQAISPKPQSQKKNEADISSSANTQKPALLSSTLSSGKARSKKCKHESGDSSGCIKPPKSPLSPELIQVEDLTLVSQLSSSVINKTSPPQPVNPPRPFKHSERRRRSQRLATLPMPDDSVEKVSSPSPATDGKVFSISSQNQQESSVPEVPDVAHLPLEKLGPCLPLDLSRGSEVTAPVASDSSYRNECPRAEKEDTQMLPNPSSKAIADGRGAPAAAGISKTEKKVKLEDKSSTAFGKRKEKDKERREKRDKDHYRPKQKKKKKKKKKSKQHDYSDYEDSSLEFLERCSSPLTRSSGSSLASRSMFTEKTTTYQYPRAILSVDLSGENLSDVDFLDDSSTESLLLSGDEYNQDFDSTNFEESQDEDDALNEIVRCICEMDEENGFMIQCEECLCWQHSVCMGLLEESIPEQYICYICRDPPGQRWSAKYRYDKEWLNNGRMCGLSFFKENYSHLNAKKIVSTHHLLADVYGVTEVLHGLQLKIGILKNKHHPDLHLWACSGKRKDQDQIIAGVEKKIAQDTVNREEKKYVQNHKEPPRLPLKMEGTYITSEHSYQKPQSFGQDCKSLADPGSSDDDDVSSLEEEQEFHMRSKNSLQYSAKEHGMPEKNPAEGNTVFVYNDKKGTEDPGDSHLQWQLNLLTHIENVQNEVTSRMDLIEKEVDVLESWLDFTGELEPPDPLARLPQLKRHIKQLLIDMGKVQQIATLCSV

SEQ ID NO: 849 - protein, 2039 aa, Homo sapiens; identical to SEQ ID NO: 156

SEQ ID NO: 850 - protein, 651 aa, Homo sapiens
MADSAELKQMVMSLRVSELQVLLGYAGRNKHGRKHELLTKALHLLKAGCSPAVQMKIKELYRRRFPQKIMTPADLSIPNVHSSPMPATLSPSTIPQLTYDGHPASSPLLPVSLLGPKHELELPHLTSALHPVHPDIKLQKLPFYDLLDELIKPTSLASDNSQRFRETCFAFALTPQQVQQISSSMDISGTKCDFTVQVQLRFCLSETSCPQEDHFPPNLCVKVNTKPCSLPGYLPPTKNGVEPKRPSRPINITSLVRLSTTVPNTIVVSWTAEIGRNYSMAVYLVKQLSSTVLLQRLRAKGIRNPDHSRALIKEKLTADPDSEIATTSLRVSLLCPLGKMRLTIPCRALTCSHLQCFDATLYIQMNEKKPTWVCPVCDKKAPYEHLIIDGLFMEILKYCTDCDEIQFKEDGTWAPMRSKKEVQEVSASYNGVDGCLSSTLEHQVASHHQSSNKNKKVEVIDLTIDSSSDEEEEEPSAKRTCPSLSPTSPLNNKGILSLPHQASPVSRTPSLPAVDTSYINTSLIQDYRHPFHMTPMPYDLQGLDFFPFLSGDNQHYNTSLLAAAAAAVSDDQDLLHSSRFFPYTSSQMFLDQLSAGGSTSLPTTNGSSSGSNSSLVSSNSLRESHSHTVTNRSSTDTASIFGIIPDIISLD

SEQ ID NO: 851 - protein, 263 aa, Homo sapiens
MLLAWVQAFLVSNMLLAEAYGSGGCFWDNGHLYREDQTSPAPGLRCLNWLDAQSGLASAPVSGAGNHSYCRNPDEDPRGPWCYVSGEAGVPEKRPCEDLRCPETTSQALPAFTTEIQEASEGPGADEVQVFAPANALPARSEAAAVQPVIGISQRVRMNSKEKKDLGTLGYVLGITMMVIIIAIGAGIILGYSYKRGKDLKEQHDQKVCEREMQRITLPLSAFTNPTCEIVDEKTVVVHTSQTPVDPQEGTTPLMGQAGTPGA

SEQ ID NO: 852 - protein, 581 aa, Homo sapiens
MAVRQALGRGLQLGRALLLRFTGKPGRAYGLGRPGPAAGCVRGERPGWAAGPGAEPRRVGLGLPNRLRFFRQSVAGLAARLQRQFVVRAWGCAGPCGRAVFLAFGLGLGLIEEKQAESRRAVSACQEIQAIFTQKSKPGPDPLDTRRLQGFRLEEYLIGQSIGKGCSAAVYEATMPTLPQNLEVTKSTGLLPGRGPGTSAPGEGQERAPGAPAFPLAIKMMWNISAGSSSEAILNTMSQELVPASRVALAGEYGAVTYRKSKRGPKQLAPHPNIIRVLRAFTSSVPLLPGALVDYPDVLPSRLHPEGLGHGRTLFLVMKNYPCTLRQYLCVNTPSPRLAAMMLLQLLEGVDHLVQQGIAHRDLKSDNILVELDPDGCPWLVIADFGCCLADESIGLQLPFSSWYVDRGGNGCLMAPEVSTARPGPRAVIDYSKADAWAVGAIAYEIFGLVNPFYGQGKAHLESRSYQEAQLPALPESVPPDVRQLVRALLQREASKRPSARVAANVLHLSLWGEHILALKNLKLDKMVGWLLQQSAATLLANRLTEKCCVETKMKMLFLANLECETLCQAALLLCSWRAAL

SEQ ID NO: 853 - protein, 375 aa, Homo sapiens
MMCQSEARQGPELRAAKWLHFPQLALRRRLGQLSCMSRPALKLRSWPLTVLYYLLPFGALRPLSRVGWRPVSRVALYKSVPTRLLSRAWGRLNQVELPHWLRRPVYSLYIWTFGVNMKEAAVEDLHHYRNLSEFFRRKLKPQARPVCGLHSVISPSDGRILNFGQVKNCEVEQVKGVTYSLESFLGPRMCTEDLPFPPAASCDSFKNQLVTREGNELYHCVIYLAPGDYHCFHSPTDWTVSHRRHFPGSLMSVNPGMARWIKELFCHNERVVLTGDWKHGFFSLTAVGATNVGSIRIYFDRDLHTNSPRHSKGSYNDFSFVTHTNREGVPMRKGEHLGEFNLGSTIVLIFEAPKDFNFQLKTGQKIRFGEALGSL

SEQ ID NO: 854 - protein, 270 aa, Homo sapiens
MVLLKEYRVILPVSVDEYQVGQLYSVAEASKNETGGGEGVEVLVNEPYEKDGEKGQYTHKIYHLQSKVPTFVRMLAPEGALNIHEKAWNAYPYCRTVITNEYMKEDFLIKIETWHKPDLGTQENVHKLEPEAWKHVEAVYIDIADRSQVLSKDYKAEEDPAKFKSIKTGRGPLGPNWKQELVNQKDCPYMCAYKLVTVKFKWWGLQNKVENFIHKQERRLFTNFHRQLFCWLDKWVDLTMDDIRRMEEETKRQLDEMRQKDPVKGMTADD

SEQ ID NO: 855 - protein, 409 aa, Homo sapiens
MMKKNNSAKRGPQDGNQQPAPPEKVGWVRKFCGKGIFREIWKNRYVVLKGDQLYISEKEVKDEKNIQEVFDLSDYEKCEELRKSKSRSKKNHSKFTLAHSKQPGNTAPNLIFLAVSPEEKESWINALNSAITRAKNRILDEVTVEEDSYLAHPTRDRAKIQHSRRPPTRGHLMAVASTSTSDGMLTLDLIQEEDPSPEEPTSCAESFRVDLDKSVAQLAGSRRRADSDRIQPSADRASSLSRPWEKTDKGATYTPQAPKKLTPTEKGRCASLEEILSQRDAASARTLQLRAEEPPTPALPNPGQLSRIQDLVARKLEETQELLAEVQGLGDGKRKAKDPPRSPPDSESEQLLLETERLLGEASSNWSQAKRVLQEVRELRDLYRQMDLQTPDSHLRQTTPHSQYRKSLM

SEQ ID NO: 856 - protein, 490 aa, Homo sapiens
MEEEGVKEAGEKPRGAQMVDKAGWIKKSSGGLLGFWKDRYLLLCQAQLLVYENEDDQKCVETVELGSYEKCQDLRALLKRKHRFILLRSPGNKVSDIKFQAPTGEEKESWIKALNEGINRGKNKAFDEVKVDKSCALEHVTRDRVRGGQRRRPPTRVHLKEVASAASDGLLRLDLDVPDSGPPVFAPSNHVSEAQPRETPRPLMPPTKPFLAPETTSPGDRVETPVGERAPTPVSASSEVSPESQEDSETPAEEDSGSEQPPNSVLPDKLKVSWENPSPQEAPAAESAEPSQAPCSETSEAAPREGGKPPTPPPKILSEKLKASMGEMQASGPPAPGTVQVSVNGMDDSPEPAKPSQAEGTPGTPPKDATTSTALPPWDLPPQFHPRCSSLGDLLGEGPRHPLQPRERLYRAQLEVKVASEQTEKLLNKVLGSEPAPVSAETLLSQAVEQLRQATQVLQEMRDLGELSQEAPGLREKRKELVTLYRRSAP

SEQ ID NO: 857 - protein, 1568 aa, Homo sapiens
MEVSRRKAPPRPPRPAAPLPLLAYLLALAAPGRGADEPVWRSEQAIGAIAASQEDGVFVASGSCLDQLDYSLEHSLSRLYRDQAGNCTEPVSLAPPARPRPGSSFSKLLLPYREGAAGLGGLLLTGWTFDRGACEVRPLGNLSRNSLRNGTEVVSCHPQGSTAGVVYRAGRNNRWYLAVAATYVLPEPETASRCNPAASDHDTAIALKDTEGRSLATQELGRLKLCEGAGSLHFVDAFLWNGSIYFPYYPYNYTSGAATGWPSMARIAQSTEVLFQGQASLDCGHGHPDGRRLLLSSSLVEALDVWAGVFSAAAGEGQERRSPTTTALCLFRMSEIQARAKRVSWDFKTAESHCKEGDQPERVQPIASSTLIHSDLTSVYGTVVMNRTVLFLGTGDGQLLKVILGENLTSNCPEVIYEIKEETPVFYKLVPDPVKNIYIYLTAGKEVRRIRVANCNKHKSCSECLTATDPHCGWCHSLQRCTFQGDCVHSENLENWLDISSGAKKCPKIQIIRSSKEKTTVTMVGSFSPRHSKCMVKNVDSSRELCQNKSQPNRTCTCSIPTRATYKDVSVVNVMFSFGSWNLSDRFNFTNCSSLKECPACVETGCAWCKSARRCIHPFTACDPSDYERNQEQCPVAVEKTSGGGRPKENKGNRTNQALQVFYIKSIEPQKVSTLGKSNVIVTGANFTRASNITMILKGTSTCDKDVIQVSHVLNDTHMKFSLPSSRKEMKDVCIQFDGGNCSSVGSLSYIALPHCSLIFPATTWISGGQNITMMGRNFDVIDNLIISHELKGNINVSEYCVATYCGFLAPSLKSSKVRTNVTVKLRVQDTYLDCGTLQYREDPRFTGYRVESEVDTELEVKIQKENDNFNISKKDIEITLFHGENGQLNCSFENITRNQDLTTILCKIKGIKTASTIANSSKKVRVKLGNLELYVEQESVPSTWYFLIVLPVLLVIVIFAAVGVTRHKSKELSRKQSQQLELLESELRKEIRDGFAELQMDKLDVVDSFGTVPFLDYKHFALRTFFPESGGFTHIFTEDMHNRDANDKNESLTALDALICNKSFLVTVIHTLEKQKNFSVKDRCLFASFLTIALQTKLVYLTSILEVLTRDLMEQCSNMQPKLMLRRTESVVEKLLTNWMSVCLSGFLRETVGEPFYLLVTTLNQKINKGPVDVITCKALYTLNEDWLLWQVPEFSTVALNVVFEKIPENESADVCRNISVNVLDCDTIGQAKEKIFQAFLSKNGSPYGLQLNEIGLELQMGTRQKELLDIDSSSVILEDGITKLNTIGHYEISNGSTIKVFKKIANFTSDVEYSDDHCHLILPDSEAFQDVQGKRHRGKHKFKVKEMYLTKLLSTKVAIHSVLEKLFRSIWSLPNSRAPFAIKYFFDFLDAQAENKKITDPDVVHIWKTNSLPLRFWVNILKNPQFVFDIKKTPHIDGCLSVIAQAFMDAFSLTEQQLGKEAPTNKLLYAKDIPTYKEEVKSYYKAIRDLPPLSSSEMEEFLTQESKKHENEFNEEVALTEIYKYIVKYFDEILNKLERERGLEEAQKQLLHVKVLFDEKKKCKWM

SEQ ID NO: 858 - protein, 335 aa, Homo sapiens
MSKRKAPQETLNGGITDMLTELANFEKNVSQAIHKYNAYRKAASVIAKYPHKIKSGAEAKKLPGVGTKIAEKIDEFLATGKLRKLEKIRQDDTSSSINFLTRVSGIGPSAARKFVDEGIKTLEDLRKNEDKLNHHQRIGLKYFGDFEKRIPREEMLQMQDIVLNEVKKVDSEYIATVCGSFRRGAESSGDMDVLLTHPSFTSESTKQPKLLHQVVEQLQKVHFITDTLSKGETKFMGVCQLPSKNDEKEYPHRRIDIRLIPKDQYYCGVLYFTGSDIFNKNMRAHALEKGFTINEYTIRPLGVTGVAGEPLPVDSEKDIFDYIQWKYREPKDRSE

SEQ ID NO: 859 - protein, 107 aa, Homo sapiens
MGRKRLITDSYPVVKRREGPAGHSKGELAPELGEEPQPRDEEEAELELLRQFDLAWQYGPCTGITRLQRWCRAKQMGLEPPPEVWQVLKTHPGDPRFQCSLWHLYPL

SEQ ID NO: 860 - protein, 133 aa, Homo sapiens
MEEDQELERKISGLKTSMAEGERKTALEMVQAAGTDRHCVTFVLHEEDHTLGNSLRYMIMKNPEVEFCGYTTTHPSESKINLRIQTRGTLPAVEPFQRGLNELMNVCQHVLDKFEASIKDYKDQKASRNESTF

SEQ ID NO: 861 - protein, 441 aa, Homo sapiens
MEQPQEEAPEVREEEEKEEVAEAEGAPELNGGPQHALPSSSYTDLSRSSSPPSLLDQLQMGCDGASCGSLNMECRVCGDKASGFHYGVHACEGCKGFFRRTIRMKLEYEKCERSCKIQKKNRNKCQYCRFQKCLALGMSHNAIRFGRMPEAEKRKLVAGLTANEGSQYNPQVADLKAFSKHIYNAYLKNFNMTKKKARSILTGKASHTAPFVIHDIETLWQAEKGLVWKQLVNGLPPYKEISVHVFYRCQCTTVETVRELTEFAKSIPSFSSLFLNDQVTLLKYGVHEAIFAMLASIVNKDGLLVANGSGFVTREFLRSLRKPFSDIIEPKFEFAVKFNALELDDSDLALFIAAIILCGDRPGLMNVPRVEAIQDTILRALEFHLQANHPDAQYLFPKLLQKMADLRQLVTEHAQMMQRIKKTETETSLHPLLQEIYKDMY

SEQ ID NO: 862 - protein, 454 aa, Homo sapiens
MSSGAPQKSSPMASGAEETPGFLDTLLQDFPALLNPEDPLPWKAPGTVLSQEEVEGELAELAMGFLGSRKAPPPLAAALAHEAVSQLLQTDLSEFRKLPREEEEEEEDDDEEEKAPVTLLDAQSLAQSFFNRLWEVAGQWQKQVPLAARASQRQWLVSIHAIRNTRRKMEDRHVSLPSFNQLFGLSDPVNRAYFAVFDGHGGVDAARYAAVHVHTNAARQPELPTDPEGALREAFRRTDQMFLRKAKRERLQSGTTGVCALIAGATLHVAWLGDSQVILVQQGQVVKLMEPHRPERQDEKARIEALGGFVSHMDCWRVNGTLAVSRAIGDVFQKPYVSGEADAASRALTGSEDYLLLACDGFFDVVPHQEVVGLVQSHLTRQQGSGLRVAEELVAAARERGSHDNITVMVVFLRDPQELLEGGNQGEGDPQAEGRRQDLPSSLPEPETQAPPRS

SEQ ID NO: 863 - protein, 126 aa, Homo sapiens
MAEAGAGLSETVTETTVTVTTEPENRSLTIKLRKRKPEKKVEWTSDTVDNEHMGRRSSKCCCIYEKPRAFGESSTESDEEEEEGCGHTHCVRGHRKGRRRATLGPTPTTPPQPPDPSQPPPGPMQH

SEQ ID NO: 864 - protein, 205 aa, Homo sapiens
MAASTASHRPIKGILKNKTSTTSSMVASAEQPRGNVDEELSKKSQKWDEMNILATYHPADKDYGLMKIDEPSTPYHSMMGDDEDACSDTEATEAMAPDILARKLAAAEGLEPKYRIQEQESSGEEDSDLSPEEREKKRQFEMKRKLHYNEGLNIKLARQLISKDLHDDDEDEEMLETADGESMNTEESNQGSTPSDQQQNKLRSS

SEQ ID NO: 865 - protein, 486 aa, Homo sapiens
MSSSSPPAGAASAAISASEKVDGFTRKSVRKAQRQKRSQGSSQFRSQGSQAELHPLPQLKDATSNEQQELFCQKLQQCCILFDFMDSVSDLKSKEIKRATLNELVEYVSTNRGVIVESAYSDIVKMISANIFRTLPPSDNPDFDPEEDEPTLEASWPHIQLVYEFFLRFLESPDFQPSIAKRYIDQKFVQQLLELFDSEDPRERDFLKTVLHRIYGKFLGLRAFIRKQINNIFLRFIYETEHFNGVAELLEILGSIINGFALPLKAEHKQFLMKVLIPMHTAKGLALFHAQLAYCVVQFLEKDTTLTEPVIRGLLKFWPKTCSQKEVMFLGEIEEILDVIEPTQFKKIEEPLFKQISKCVSSSHFQVAERALYFWNNEYILSLIEENIDKILPIMFASLYKISKEHWNPTIVALVYNVLKTLMEMNGKLFDDLTSSYKAERQREKKKELEREELWKKLEELKLKKALEKQNSAYNMHSILSNTSAE

SEQ ID NO: 866 - protein, 170 aa, Homo sapiens
MGNEASYPLEMCSHFDADEIKRLGKRFKKLDLDNSGSLSVEEFMSLPELQQNPLVQRVIDIFDTDGNGEVDFKEFIEGVSQFSVKGDKEQKLRFAFRIYDMDKDGYISNGELFQVLKMMVGNNLKDTQLQQIVDKTIINADKDGDGRISFEEFCAVVGGLDIHKKMVVDV

SEQ ID NO: 867 - protein, 933 aa, Homo sapiens
MADLSLLQEDLQEDADGSLDFVSQDEMLTPLGRLDKYAASENIFNRQMVARSLLDTLREVCDDERDCIAVLERISRLADDSEPTVRAELMEQVPHIALFCQENRPSIPYAFSKFLLPIVVRYLADQNNQVRKTSQAALLALLEQELIERFDVETKVCPVLIELTAPDSNDDVKTEAVAIMCKMAPMVGKDITERLILPRFCEMCCDCRMFHVRKVCAANFGDICSVVGQQATEEMLLPRFFQLCSDNVWGVRKACAECFMAVSCATCQEIRRTKLSALFINLISDPSRWVRQAAFQSLGPFISTFANPSSSGQYFKEESKSSEEMSVENKNRTRDQEAPEDVQVRPEDTPSDLSVSNSSVILENTMEDHAAEASGKPLGEISVPLDSSLLCTLSSESHQEAASNENDKKPGNYKSMLRPEVGTTSQDSALLDQELYNSFHFWRTPLPEIDLDIELEQNSGGKPSPEGPEEESEGPVPSSPNITMATRKELEEMIENLEPHIDDPDVKAQVEVLSAALRASSLDAHEETISIEKRSDLQDELDINELPNCKINQEDSVPLISDAVENMDSTLHYIHSDSDLSNNSSFSPDEERRTKVQDVVPQALLDQYLSMTDPSRAQTVDTEIAKHCAYSLPGVALTLGRQNWHCLRETYETLASDMQWKVRRTLAFSIHELAVILGDQLTAADLVPIFNGFLKDLDEVRIGVLKHLHDFLKLLHIDKRREYLYQLQEFLVTDNSRNWRFRAELAEQLILLLELYSPRDVYDYLRPIALNLCADKVSSVRWISYKLVSEMVKKLHAATPPTFGVDLINELVENFGRCPKWSGRQAFVFVCQTVIEDDCLPMDQFAVHLMPHLLTLANDRVPNVRVLLAKTLRQTLLEKDYFLASASCHQEAVEQTIMALQMDRDSDVKYFASIHPASTKISEDAMSTASSTY

SEQ ID NO: 868 - protein, 559 aa, Homo sapiens
MRRLSSWRKMATAEKQKHDGRVKIGHYILGDTLGVGTFGKVKVGKHELTGHKVAVKILNRQKIRSLDVVGKIRREIQNLKLFRHPHIIKLYQVISTPSDIFMVMEYVSGGELFDYICKNGRLDEKESRRLFQQILSGVDYCHRHMVVHRDLKPENVLLDAHMNAKIADFGLSNMMSDGEFLRTSCGSPNYAAPEVISGRLYAGPEVDIWSSGVILYALLCGTLPFDDDHVPTLFKKICDGIFYTPQYLNPSVISLLKHMLQVDPMKRATIKDIREHEWFKQDLPKYLFPEDPSYSSTMIDDEALKEVCEKFECSEEEVLSCLYNRNHQDPLAVAYHLIIDNRRIMNEAKDFYLATSPPDSFLDDHHLTRPHPERVPFLVAETPRARHTLDELNPQKSKHQGVRKAKWHLGIRSQSRPNDIMAEVCRAIKQLDYEWKVVNPYYLRVRRKNPVTSTYSKMSLQLYQVDSRTYLLDFRSIDDEITEAKSGTATPQRSGSVSNYRSCQRSDSDAEAQGKSSEVSLTSSVTSLDSSPVDLTPRPGSHTIEFFEMCANLIKILAQ

SEQ ID NO: 869 - protein, 569 aa, Homo sapiens
MGSAVMDTKKKKDVSSPGGSGGKKNASQKRRSLRVHIPDLSSFAMPLLDGDLEGSGKHSSRKVDSPFGPGSPSKGFFSRGPQPRPSSPMSAPVRPKTSPGSPKTVFPFSYQESPPRSPRRMSFSGIFRSSSKESSPNSNPATSPGGIRFFSRSRKTSGLSSSPSTPTQVTKQHTFPLESYKHEPERLENRIYASSSPPDTGQRFCPSSFQSPTRPPLASPTHYAPSKAAALAAALGPAEAGMLEKLEFEDEAVEDSESGVYMRFMRSHKCYDIVPTSSKLVVFDTTLQVKKAFFALVANGVRAAPLWESKKQSFVGMLTITDFINILHRYYKSPMVQIYELEEHKIETWRELYLQETFKPLVNISPDASLFDAVYSLIKNKIHRLPVIDPISGNALYILTHKRILKFLQLFMSDMPKPAFMKQNLDELGIGTYHNIAFIHPDTPIIKALNIFVERRISALPVVDESGKVVDIYSKFDVINLAAEKTYNNLDITVTQALQHRSQYFEGVVKCNKLEILETIVDRIVRAEVHRLVVVNEADSIVGIISLSDILQALILTPAGAKQKETETE

SEQ ID NO: 870 - protein, 676 aa, Homo sapiens
MAPFLRIAFNSYELGSLQAEDEANQPFCAVKMKEALSTERGKTLVQKKPTMYPEWKSTFDAHIYEGRVIQIVLMRAAEEPVSEVTVGVSVLAERCKKNNGKAEFWLDLQPQAKVLMSVQYFLEDVDCKQSMRSEDEAKFPTMNRRGAIKQAKIHYIKNHEFIATFFGQPTFCSVCKDFVWGLNKQGYKCRQCNAAIHKKCIDKIIGRCTGTAANSRDTIFQKERFNIDMPHRFKVHNYMSPTFCDHCGSLLWGLVKQGLKCEDCGMNVHHKCREKVANLCGINQKLLAEALNQVTQRASRRSDSASSEPVGIYQGFEKKTGVAGEDMQDNSGTYGKIWEGSSKCNINNFIFHKVLGKGSFGKVLLGELKGRGEYFAIKALKKDVVLIDDDVECTMVEKRVLTLAAENPFLTHLICTFQTKDHLFFVMEFLNGGDLMYHIQDKGRFELYRATFYAAEIMCGLQFLHSKGIIYRDLKLDNVLLDRDGHIKIADFGMCKENIFGESRASTFCGTPDYIAPEILQGLKYTFSVDWWSFGVLLYEMLIGQSPFHGDDEDELFESIRVDTPHYPRWITKESKDILEKLFEREPTKRLGVTGNIKIHPFFKTINWTLLEKRRLEPPFRPKVKSPRDYSNFDQEFLNEKARLSYSDKNLIDSMDQSAFAGFSFVNPKFEHLLED

SEQ ID NO: 871 - protein, 433 aa, Homo sapiens
MATSGDCPRSESQGEEPAECSEAGLLQEGVQPEEFVAIADYAATDETQLSFLRGEKILILRQTTADWWWGERAGCCGYIPANHVGKHVDEYDPEDTWQDEEYFGSYGTLKLHLEMLADQPRTTKYHSVILQNKESLTDKVILDVGCGTGIISLFCAHYARPRAVYAVEASEMAQHTGQLVLQNGFADIITVYQQKVEDVVLPEKVDVLVSEWMGTCLLFEFMIESILYARDAWLKEDGVIWPTMAALHLVPCSADKDYRSKVLFWDNAYEFNLSALKSLAVKEFFSKPKYNHILKPEDCLSEPCTILQLDMRTVQISDLETLRGELRFDIRKAGTLHGFTAWFSVHFQSLQEGQPPQVLSTGPFHPTTHWKQTLFMMDDPVPVHTGDVVTGSVVLQRNPVWRRHMSVALSWAVTSRQDPTSQKVGEKVFPIWR

SEQ ID NO: 872 - protein, 453 aa, Homo sapiens
MEDYLQGCRAALQESRPLHVVLGNEACDLDSTVSALALAFYLAKTTEAEEVFVPVLNIKRSELPLRGDIVFFLQKVHIPESILIFRDEIDLHALYQAGQLTLILVDHHILSKSDTALEEAVAEVLDHRPIEPKHCPPCHVSVELVGSCATLVTERILQGAPEILDRQTAALLHGTIILDCVNMDLKIGKATPKDSKYVEKLEALFPDLPKRNDIFDSLQKAKFDVSGLTTEQMLRKDQKTIYRQGVKVAISAIYMDLEAFLQRSNLLADLHAFCQAHSYDVLVAMTIFFNTHNEPVRQLAIFCPHVALQTTICEVLERSHSPPLKLTPASSTHPNLHAYLQGNTQVSRKKLLPLLQEALSAYFDSMKIPSGQPETADVSREQVDKELDRASNSLISGLSQDEEDPPLPPTPMNSLVDECPLDQGLPKLSAEAVFEKCSQISLSQSTTASLSKK

SEQ ID NO: 873 - protein, 524 aa, Homo sapiens
MYALFLLASLLGAALAGPVLGLKECTRGSAVWCQNVKTASDCGAVKHCLQTVWNKPTVKSLPCDICKDVVTAAGDMLKDNATEEEILVYLEKTCDWLPKPNMSASCKEIVDSYLPVILDIIKGEMSRPGEVCSALNLCESLQKHLAELNHQKQLESNKIPELDMTEVVAPFMANIPLLLYPQDGPRSKPQPKDNGDVCQDCIQMVTDIQTAVRTNSTFVQALVEHVKEECDRLGPGMADICKNYISQYSEIAIQMMMHMQPKEICALVGFCDEVKEMPMQTLVPAKVASKNVIPALELVEPIKKHEVPAKSDVYCEVCEFLVKEVTKLIDNNKTEKEILDAFDKMCSKLPKSLSEECQEVVDTYGSSILSILLEEVSPELVCSMLHLCSGTRLPALTVHVTQPKDGGFCEVCKKLVGYLDRNLEKNSTKQEILAALEKGCSFLPDPYQKQCDQFVAEYEPVLIEILVEVMDPSFVCLKIGACPSAHKPLLGTEKCIWGPSYWCQNTETAAQCNAVEHCKRHVWN

SEQ ID NO: 874 - protein, 467 aa, Homo sapiens
MTELPAPLSYFQNAQMSEDNHLSNTVRSQNDNRERQEHNDRRSLGHPEPLSNGRPQGNSRQVVEQDEEEDEELTLKYGAKHVIMLFVPVTLCMVVVVATIKSVSFYTRKDGQLIYTPFTEDTETVGQRALHSILNAAIMISVIVVMTILLVVLYKYRCYKVIHAWLIISSLLLLFFFSFIYLGEVFKTYNVAVDYITVALLIWNFGVVGMISIHWKGPLRLQQAYLIMISALMALVFIKYLPEWTAWLILAVISVYDLVAVLCPKGPLRMLVETAQERNETLFPALIYSSTMVWLVNMAEGDPEAQRRVSKNSKYNAESTERESQDTVAENDDGGFSEEWEAQRDSHLGPHRSTPESRAAVQELSSSILAGEDPEERGVKLGLGDFIFYSVLVGKASATASGDWNTTIACFVAILIGLCLTLLLLAIFKKALPALPISITFGLVFYFATDYLVQPFMDQLAFHQFYI

SEQ ID NO: 875 - protein, 416 aa, Homo sapiens
MMPQLQFKDAFWCRDFTAHTGYEVLLQRLLDGRKMCKDMEELLRQRAQAEERYGKELVQIARKAGGQTEINSLRASFDSLKQQMENVGSSHIQLALTLREELRSLEEFRERQKEQRKKYEAVMDRVQKSKLSLYKKAMESKKTYEQKCRDADDAEQAFERISANGHQKQVEKSQNKARQCKDSATEAERVYRQSIAQLEKVRAEWEQEHRTTCEAFQLQEFDRLTILRNALWVHSNQLSMQCVKDDELYEEVRLTLEGCSIDADIDSFIQAKSTGTEPPAPVPYQNYYDREVTPLTSSPGIQPSCGMIKRFSGLLHGSPKTTSLAASAASTETLTPTPERNEGVYTAIAVQEIQGNPASPAQEYRALYDYTAQNPDELDLSAGDILEVILEGEDGWWTVERNGQRGFVPGSYLEKL

SEQ ID NO: 876 - protein, 342 aa, Homo sapiens
MEPHDSSHMDSEFRYTLFPIVYSIIFVLGVIANGYVLWVFARLYPCKKFNEIKIFMVNLTMADMLFLITLPLWIVYYQNQGNWILPKFLCNVAGCLFFINTYCSVAFLGVITYNRFQAVTRPIKTAQANTRKRGISLSLVIWVAIVGAASYFLILDSTNTVPDSAGSGNVTRCFEHYEKGSVPVLIIHIFIVFSFFLVFLIILFCNLVIIRTLLMQPVQQQRNAEVKRRALWMVCTVLAVFIICFVPHHVVQLPWTLAELGFQDSKFHQAINDAHQVTLCLLSTNCVLDPVIYCFLTKKFRKHLTEKFYSMRSSRKCSRATTDTVTEVVVPFNQIPGNSLKN

SEQ ID NO: 877 - protein, 403 aa, Homo sapiens [sequence omitted]

SEQ ID NO: 878 - protein, 488 aa, Homo sapiens
MSTPGVNSSASLSPDRLNSPVTIPAVMFIFGVVGNLVAIVVLCKSRKEQKETTFYTLVCGLAVTDLLGTLLVSPVTIATYMKGQWPGGQPLCEYSTFILLFFSLSGLSIICAMSVERYLAINHAYFYSHYVDKRLAGLTLFAVYASNVLFCALPNMGLGSSRLQYPDTWCFIDWTTNVTAHAAYSYMYAGFSSFLILATVLCNVLVCGALLRMHRQFMRRTSLGTEQHHAAAAASVASRGHPAASPALPRLSDFRRRRSFRRIAGAEIQMVILLIATSLVVLICSIPLVVRVFVNQLYQPSLEREVSKNPDLQAIRIASVNPILDPWIYILLRKTVLSKAIEKIKCLFCRIGGSRRERSGQHCSDSQRTSSAMSGHSRSFISRELKEISSTSQTLLPDLSLPDLSENGLGGRNLLPGVPGMGLAQEDTTSLRTLRISETSDSSQGQDSESVLLVDEAGGSGRAGPAPKGSSLQVTFPSETLNLSEKCI

SEQ ID NO: 879 - protein, 595 aa, Homo sapiens
MVRWFHRDLSGLDAETLLKGRGVHGSFLARPSRKNQGDFSLSVRVGDQVTHIRIQNSGDFYDLYGGEKFATLTELVEYYTQQQGVLQDRDGTIIHLKYPLNCSDPTSERWYHGHMSGGQAETLLQAKGEPWTFLVRESLSQPGDFVLSVLSDQPKAGPGSPLRVTHIKVMCEGGRYTVGGLETFDSLTDLVEHFKKTGIEEASGAFVYLRQPYYATRVNAADIENRVLELNKKQESEDTAKAGFWEEFESLQKQEVKNLHQRLEGQRPENKGKNRYKNILPFDHSRVILQGRDSNIPGSDYINANYIKNQLLGPDENAKTYIASQGCLEATVNDFWQMAWQENSRVIVMTTREVEKGRNKCVPYWPEVGMQRAYGPYSVTNCGEHDTTEYKLRTLQVSPLDNGDLIREIWHYQYLSWPDHGVPSEPGGVLSFLDQINQRQESLPHAGPIIVHCSAGIGRTGTIIVIDMLMENISTKGLDCDIDIQKTIQMVRAQRSGMVQTEAQYKFIYVAIAQFIETTKKKLEVLQSQKGQESEYGNITYPPAMKNAHAKASRTSSKHKEDVYENLHTKNKREEKVKKQRSADKEKSKGSLKRK

SEQ ID NO: 880 - protein, 700 aa, Homo sapiens
MEPLCPLLLVGFSLPLARALRGNETTADSNETTTTSGPPDPGASQPLLAWLLLPLLLLLLVLLLAAYFFRFRKQRKAVVSTSDKKMPNGILEEQEQQRVMLLSRSPSGPKKYFPIPVEHLEEEIRIRSADDCKQFREEFNSLPSGHIQGTFELANKEENREKNRYPNILPNDHSRVILSQLDGIPCSDYINASYIDGYKEKNKFIAAQGPKQETVNDFWRMVWEQKSATIVMLTNLKERKEEKCHQYWPDQGCWTYGNIRVCVEDCVVLVDYTIRKFCIQPQLPDGCKAPRLVSQLHFTSWPDFGVPFTPIGMLKFLKKVKTLNPVHAGPIVVHCSAGVGRTGTFIVIDAMMAMMHAEQKVDVFEFVSRIRNQRPQMVQTDMQYTFIYQALLEYYLYGDTELDVSSLEKHLQTMHGTTTHFDKIGLEEEFRKLTNVRIMKENMRTGNLPANMKKARVIQIIPYDFNRVILSMKRGQEYTDYINASFIDGYRQKDYFIATQGPLAHTVEDFWRMIWEWKSHTIVMLTEVQEREQDKCYQYWPTEGSVTHGEITIEIKNDTLSEAISIRDFLVTLNQPQARQEEQVRVVRQFHFHGWPEIGIPAEGKGMIDLIAAVQKQQQQTGNHPITVHCSAGAGRTGTFIALSNILERVKAEGLLDVFQAVKSLRLQRPHMVQTLEQYEFCYKVVQDFIDIFSDYANFK

SEQ ID NO: 881 - protein, 1064 aa, Homo sapiens
MNHDFQALALESRGMGELLPTKKFWEPDDSTKDGQKGIFLGDDEWRETAWGASHHSMSQPIMVQRRSGQGFHGNSEVNAILSPRSESGGLGVSMVEYVLSSSPADKLDSRFRKGNFGTRDAETDGPEKGDQKGKASPFEEDQNRDLKQGDDDDSKINGRGLPNGMDADCKDFNRTPGSRQASPTEVVERLGPNTNPSEGLGPLPNPTANKPLVEEFSNPETQNLDAMEQVGLESLQFDYPGNQVPMDSSGATVGLFDYNSQQQLFQRTNALTVQQLTAAQQQQYALAAAQQPHIAGVFSAGLAPAAFVPNPYIISAAPPGTDPYTAAGLAAAATLAGPAVVPPQYYGVPWGVYPANLFQQQAAAAANNTASQQAASQAQPGQQQVLRAGAGQRPLTPNQGQQGQQAESLAAAAAANPTLAFGQGLATGMPGYQVLAPTAYYDQTGALVVGPGARTGLGAPVRLMAPTPVLISSAAAQAAAAAAAGGTASSLTGSTNGLFRPIGTQPPQQQQQQPSTNLQSNSFYGSSSLTNSSQSSSLFSHGPGQPGSTSLGFGSGNSLGAAIGSALSGFGSSVGSSASSSATRRESLSTSSDLYKRSSSSLAPIGQPFYNSLGFSSSPSPIGMPLPSQTPGHSLTPPPSLSSHGSSSSLHLGGLTNGSGRYISAAPGAEAKYRSASSTSSLFSSSSQLFPPSRLRYNRSDIMPSGRSRLLEDFRNNRFPNLQLRDLIGHIVEFSQDQHGSRFIQQKLERATPAERQMVFNEILQAAYQLMTDVFGNYVIQKFFEFGSLDQKLALATRIRGHVLPLALQMYGCRVIQKALESISSDQQSEMVKELDGHVLKCVKDQNGNHVVQKCIECVQPQSLQFIIDAFKGQVFVLSTHPYGCRVIQRILEHCTAEQTLPILEELHQHTEQLVQDQYGNYVIQHVLEHGRPEDKSKIVSEIRGKVLALSQHKFASNVVEKCVTHASRAERALLIDEVCCQNDGPHSALYTMMKDQYANYVVQKMIDMAEPAQRKIIMHKIRPHITTLRKYTYGKHILAKLEKYYLKNSPDLGPIGGPPNGML

SEQ ID NO: 882 - protein, 976 aa, Homo sapiens
MSNSNTTQETLEIMKESEKKLVEESVNKNKFISKTPSKEEIEKECEDTSLRQETQRRTSNHGHARKRAKSNSKLKLVRSLAVCEESSTPFADGPLETQDIIQLHISCPSDKEEEKSTKDVSEKEDKDKNKEKIPRKMLSRDSSQEYTDSTGIDLHEFLVNTLKKNPRDRMMLLKLEQEILEFINDNNNQFKKFPQMTSYHRMLLHRVAAYFGMDHNVDQTGKAVIINKTSNTRIPEQRFSEHIKDEKNTEFQQRFILKRDDASMDRDDNQTGQNGYLNDIRLSKEAFSSSSHKRRQIFRGNREGLSRTSSSRQSSTDSELKSLEPRPWSSTDSDGSVRSMRPPVTKASSFSGISILTRGDSIGSSKGGSAGRISRPGMALGAPEVCNQVTSSQSVRGLLPCTAQQQQQQQQQQLPALPPTPQQQPPLNNHMISQADDLSNPFGQMSLSRQGSTEAADPSAALFQTPLISQHPQQTSFIMASTGQPLPTSNYSTSSHAPPTQQVLPPQGYMQPPQQIQVSYYPPGQYPNSNQQYRPLSHPVAYSPQRGQQLPQPSQQPGLQPMMPNQQQAAYQGMIGVQQPQNQGLLSSQRSSMGGQMQGLVVQYTPLPSYQVPVGSDSQNVVQPPFQQPMLVPVSQSVQGGLPAAGVPVYYSMIPPAQQNGTSPSVGFLQPPGSEQYQMPQSPSPCSPPQMPQQYSGVSPSGPGVVVMQLNVPNGPQPPQNPSMVQWSHCKYYSMDQRGQKPGDLYSPDSSPQANTQMSSSPVTSPTQSPAPSPVTSLSSVCTGLSPLPVLTQFPRPGGPAQGDGRYSLLGQPLQYNLSICPPLLHGQSTYTVHQGQSGLKHGNRGKRQALKSASTDLGTADVVLGRVLEVTDLPEGITRTEADKLFTQLAMSGAKIQWLKDAQGLPGGGGGDNSGTAENGRHSDLAALYTIVAVFPSPLAAQNASLRLNNSVSRFKLRMAKKNYDLRILERASSQ

SEQ ID NO: 883 - protein, 649 aa, Homo sapiens
MSLMVSAGRGLGAVWSPTHVQVTVLQARGLRAKGPGGTSDAYAVIQVGKEKYATSVSERSLGAPVWREEATFELPSLLSSGPAAAATLQLTVLHRALLGLDKFLGRAEVDLRDLHRDQGRRKTQWYKLKSKPGKKDKERGEIEVDIQFMRNNMTASMFDLSMKDKSRNPFGKLKDKIKGKNKDSGSDTASAIIPSTTPSVDSDDESVVKDKKKKSKIKTLLSKSNLQKTPLSQSMSVLPTSKPEKVLLRPGDFQSQWDEDDNEDESSSASDVMSHKRTASTDLKQLNQVNFTLPKKEGLSFLGGLRSKNDVLSRSNVCINGNHVYLEQPEAKGEIKDSSPSSSPSPKGFRKKHLFSSTENLAAGSWKEPAEGGGLSSDRQLSESSTKDSLKSMTLPSYRPAPLVSGDLRENMAPANSEATKEAKESKKPESRRSSLLSLMTGKKDVAKGSEGENPLTVPGREKEGMLMGVKPGEDASGPAEDLVRRSEKDTAAVVSRQGSSLNLFEDVQITEPEAEPESKSEPRPPISSPRAPQTRAVKPRLHPVKPMNAMATKVANCSLGTATIISENLNNEVMMKKYSPSDPAFAYAQLTHDELIQLVLKQKETISKKEFQVRELEDYIDNLLVRVMEETPNILRIPTQVGKKAGKM

SEQ ID NO: 884 - protein, 215 aa, Homo sapiens
MATAPYNYSYIFKYIIIGDMGVGKSCLLHQFTEKKFMADCPHTIGVEFGTRIIEVSGQKIKLQIWDTAGQERFRAVTRSYYRGAAGALMVYDITRRSTYNHLSSWLTDARNLTNPNTVIILIGNKADLEAQRDVTYEEAKQFAEENGLLFLEASAKTGENVEDAFLEAAKKIYQNIQDGSLDLNAAESGVQHKPSAPQGGRLTSEPQPQREGCGC

SEQ ID NO: 885 - protein, 195 aa, Homo sapiens
MMAIRELKVCLLGDTGVGKSSIVCRFVQDHFDHNISPTIGASFMTKTVPCGNELHKFLIWDTAGQERFHSLAPMYYRGSAAAVIVYDITKQDSFYTLKKWVKELKEHGPENIVMAIAGNKCDLSDIREVPLKDAKEYAESIGAIVVETSAKNAINIEELFQGISRQIPPLDPHENGNNGTIKVEKPTMQASRRCC

SEQ ID NO: 886 - protein, 213 aa, Homo sapiens
MAETYDFLFKFLVIGSAGTGKSCLLHQFIENKFKQDSNHTIGVEFGSRVVNVGGKTVKLQIWDTAGQERFRSVTRSYYRGAAGALLVYDITSRETYNSLAAWLTDARTLASPNIVVILCGNKKDLDPEREVTFLEASRFAQENELMFLETSALTGENVEEAFLKCARTILNKIDSGELDPERMGSGIQYGDASLRQLRQPRSAQAVAPQPCGC

SEQ ID NO: 887 - protein, 207 aa, Homo sapiens
MTSRKKVLLKVIILGDSGVGKTSLMNQYVNKKFSNQYKATIGADFLTKEVMVDDRLVTMQIWDTAGQERFQSLGVAFYRGADCCVLVFDVTAPNTFKTLDSWRDEFLIQASPRDPENFPFVVLGNKIDLENRQVATKRAQAWCYSKNNIPYFETSAKEAINVEQAFQTIARNALKQETEVELYNEFPEPIKLDKNDRAKASAESCSC

SEQ ID NO: 888 - protein, 648 aa, Homo sapiens [sequence omitted]

SEQ ID NO: 889 - protein, 206 aa, Homo sapiens
MAANKSKGQSSLALHKVIMVGSGGVGKSALTLQFMYDEFVEDYEPTKADSYRKKVVLDGEEVQIDILDTAGQEDYAAIRDNYFRSGEGFLLVFSITEHESFTATAEFREQILRVKAEEDKIPLLVVGNKSDLEERRQVPVEEARSKAEEWGVQYVETSAKTRANVDKVFFDLMREIRTKKMSENKDKNGKKSSKNKKSFKERCCLL

SEQ ID NO: 890 - protein, 462 aa, Homo sapiens
MASNSSSCPTPGGGHLNGYPVPPYAFFFPPMLGGLSPPGALTTLQHQLPVSGYSTPSPATIETQSSSSEEIVPSPPSPPPLPRIYKPCFVCQDKSSGYHYGVSACEGCKGFFRRSIQKNMVYTCHRDKNCIINKVTRNRCQYCRLQKCFEVGMSKESVRNDRNKKKKEVPKPECSESYTLTPEVGELIEKVRKAHQETFPALCQLGKYTTNNSSEQRVSLDIDLWDKFSELSTKCIIKTVEFAKQLPGFTTLTIADQITLLKAACLDILILRICTRYTPEQDTMTFSDGLTLNRTQMHNAGFGPLTDLVFAFANQLLPLEMDDAETGLLSAICLICGDRQDLEQPDRVDMLQEPLLEALKVYVRKRRPSRPHMFPKMLMKITDLRSISAKGAERVITLKMEIPGSMPPLIQEMLENSEGLDTLSGQPGGGGRDGGGLAPPPGSCSPSLSPSSNRSSPATHSP

SEQ ID NO: 891 - protein, 326 aa, Homo sapiens
MDYSHQTSLVPCGQDKYISKNELLLHLKTYNLYYEGQNLQLRHREEEDEFIVEGLLNISWGLRRPIRLQMQDDNERIRPPPSSSSWHSGCNLGAQGTTLKPLTVPKVQISEVDAPPEGDQMPSSTDSRGLKPLQEDTPQLMRTRSDVGVRRRGNVRTPSDQRRIRRHRFSINGHFYNHKTSVFTPAYGSVTNVRINSTMTTPQVLKLLLNKFKIENSAEEFALYVVHTSGEKQKLKATDYPLIARILQGPCEQISKVFLMEKDQVEEVTYDVAQYIKFEMPVLKSFIQKLQEEEDREVKKLMRKYTVLRLMIRQRLEEIAETPATI

SEQ ID NO: 892 - protein, 423 aa, Homo sapiens; identical to SEQ ID NO: 168

SEQ ID NO: 893 - protein, 406 aa, Homo sapiens
MGKVWKQQMYPQYATYYYPQYLQAKQSLVPAHPMAPPSPSTTSSNNNSSSSSNSGWDQLSKTNLYIRGLPPHTTDQDLVKLCQPYGKIVSTKAILDKTTNKCKGYGFVDFDSPAAAQKAVSALKASGVQAQMAKQQEQDPTNLYISNLPLSMDEQELENMLKPFGQVISTRILRDSSGTSRGVGFARMESTEKCEAVIGHFNGKFIKTPPGVSAPTEPLLCKFADGGQKKRQNPNKYIPNGRPWHREGEVRLAGMTLTYDPTTAAIQNGFYPSPYSIATNRMITQTSITPYIASPVSAYQVQSPSWMQPQPYILQHPGAVLTPSMEHTMSLQPASMISPLAQQMSHLSLGSTGTYMPATSAMQGAYLPQYAHMQTTAVPVEEASGQQQVAVETSNDHSPYTFQPNK

SEQ ID NO: 894 - protein, 1064 aa, Homo sapiens
MPVQAAQWTEFLSCPICYNEFDENVHKPISLGCSHTVCKTCLNKLHRKACPFDQTAINTDIDVLPVNFALLQLVGAQVPDHQSIKLSNLGENKHYEVAKKCVEDLALYLKPLSGGKGVASLNQSALSRPMQRKLVTLVNCQLVEEEGRVRAMRAARSLGERTVTELILQHQNPQQLSANLWAAVRARGCQFLGPAMQEEALKLVLLALEDGSALSRKVLVLFVVQRLEPRFPQASKTSIGHVVQLLYRASCFKVTKRDEDSSLMQLKEEFRSYEALRREHDAQIVHIAMEAGLRISPEQWSSLLYGDLAHKSHMQSIIDKLQSPESFAKSVQELTIVLQRTGDPANLNRLRPHLELLANIDPNPDAVSPTWEQLENAMVAVKTVVHGLVDFIQNYSRKGHETPQPQPNSKYKTSMCRDLRQQGGCPRGTNCTFAHSQEELEKYRLRNKKINATVRTFPLLNKVGVNNTVTTTAGNVISVIGSTETTGKIVPSTNGISNAENSVSQLISRSTDSTLRALETVKKVGKVGANGQNAAGPSADSVTENKIGSPPKTPVSNVAATSAGPSNVGTELNSVPQKSSPFLTRVPVYPPHSENIQYFQDPRTQIPFEVPQYPQTGYYPPPPTVPAGVAPCVPRFVRSNNVPESSLPPASMPYADHYSTFSPRDRMNSSPYQPPPPQPYGPVPPVPSGMYAPVYDSRRIWRPPMYQRDDIIRSNSLPPMDVMHSSVYQTSLRERYNSLDGYYSVACQPPSEPRTTVPLPREPCGHLKTSCEEQIRRKPDQWAQYHTQKAPLVSSTLPVATQSPTPPSPLFSVDFRADFSESVSGTKFEEDHLSHYSPWSCGTIGSCINAIDSEPKDVIANSNAVLMDLDSGDVKRRVHLFETQRRTKEEDPIIPFSDGPIISKWGAISRSSRTGYHTTDPVQATASQGSATKPISVSDYVPYVNAVDSRWSSYGNEATSSAHYVERDRFIVTDLSGHRKHSSTGDLLSLELQQAKSNSLLLQREANALAMQQKWNSLDEGRHLTLNLLSKEIELRNGEVKKLNLSASCLMYLFSAAASWLYHY

SEQ ID NO: 895 - protein, 1566 aa, Homo sapiens
MTADKDKDKDKEKDRDRDRDREREKRDKARESENSRPRRSCTLEGGAKNYAESDHSEDEDNDNNSATAEESTKKNKKKPPKKKSRYERTDTGEITSYITEDDVVYRPGDCVYIESRRPNTPYFICSIQDFKLVHNSQACCRSPTPALCDPPACSLPVASQPPQHLSEAGRGPVGSKRDHLLMNVKWYYRQSEVPDSVYQHLVQDRHNENDSGRELVITDPVIKNRELFISDYVDTYHAAALRGKCNISHFSDIFAAREFKARVDSFFYILGYNPETRRLNSTQGEIRVGPSHQAKLPDLQPFPSPDGDTVTQHEELVWMPGVNDCDLLMYLRAARSMAAFAGMCDGGSTEDGCVAASRDDTTLNALNTLHESGYDAGKALQRLVKKPVPKLIEKCWTEDEVKRFVKGLRQYGKNFFRIRKELLPNKETGELITFYYYWKKTPEAASSRAHRRHRRQAVFRRIKTRTASTPVNTPSRPPSSEFLDLSSASEDDFDSEDSEQELKGYACRHCFTTTSKDWHHGGRENILLCTDCRIHFKKYGELPPIEKPVDPPPFMFKPVKEEDDGLSGKHSMRTRRSRGSMSTLRSGRKKQPASPDGRTSPINEDIRSSGRNSPSAASTSSNDSKAETVKKSAKKVKEEASSPLKSNKRQREKVASDTEEADRTSSKKTKTQEISRPNSPSEGEGESSDSRSVNDEGSSDPKDIDQDNRSTSPSIPSPQDNESDSDSSAQQQMLQAQPPALQAPTGVTPAPSSAPPGTPQLPTPGPTPSATAVPPQGSPTASQAPNQPQAPTAPVPHTHIQQAPALHPQRPPSPHPPPHPSPHPPLQPLTGSAGQPSAPSHAQPPLHGQGPPGPHSLQAGPLLQHPGPPQPFGLPPQASQGQAPLGTSPAAAYPHTSLQLPASQSALQSQQPPREQPLPPAPLAMPHIKPPPTTPIPQLPAPQAHKHPPHLSGPSPFSMNANLPPPPALKPLSSLSTHHPPSAHPPPLQLMPQSQPLPSSPAQPPGLTQSQNLPPPPASHPPTGLHQVAPQPPFAQHPFVPGGPPPITPPTCPSTSTPPAGPGTSAQPPCSGAAASGGSIAGGSSCPLPTVQIKEEALDDAEEPESPPPPPRSPSPEPTVVDTPSHASQSARFYKHLDRGYNSCARTDLYFMPLAGSKLAKKREEAIEKAKREAEQKAREEREREKEKEKEREREREREREAERAAKASSSAHEGRLSDPQLSGPGHMRPSFEPPPTTIAAVPPYIGPDTPALRTLSEYARPHVMSPTNRNHPFYMPLNPTDPLLAYHMPGLYNVDPTIRERELREREIREREIRERELRERMKPGFEVKPPELDPLHPAANPMEHFARHSALTIPPTAGPHPFASFHPGLNPLERERLALAGPQLRPEMSYPDRLAAERIHAERMASLTSDPLARLQMFNVTPHHHQHSHIHSHLHLHQQDPLHQGSAGPVHPLVDPLTAGPHLARFPYPPGTLPNPLLGQPPHEHEMLRHPVFGTPYPRDLPGAIPPPMSAAHQLQAMHAQSAELQRLAMEQQWLHGHPHMHGGHLPSQEDYYSRLKKEGDKQL

SEQ ID NO: 896 - protein, 566 aa, Homo sapiens
MPGKPKHLGVPNGRMVLAVSDGELSSTTGPQGQGEGRGSSLSIHSLPSGPSSPFPTEEQPVASWALSFERLLQDPLGLAYFTEFLKKEFSAENVTFWKACERFQQIPASDTQQLAQEARNIYQEFLSSQALSPVNIDRQAWLGEEVLAEPRPDMFRAQQLQIFNLMKFDSYARFVKSPLYRECLLAEAEGRPLREPGSSRLGSPDATRKKPKLKPGKSLPLGVEELGQLPPVEGPGGRPLRKSFRRELGGTANAALRRESQGSLNSSASLDLGFLAFVSSKSESHRKSLGSTEGESESRPGKYCCVYLPDGTASLALARPGLTIRDMLAGICEKRGLSLPDIKVYLVGNEQALVLDQDCTVLADQEVRLENRITFELELTALERVVRISAKPTKRLQEALQPILEKHGLSPLEVVLHRPGEKQPLDLGKLVSSVAAQRLVLDTLPGVKISKARDKSPCRSQGCPPRTQDKATHPPPASPSSLVKVPSSATGKRQTCDIEGLVELLNRVQSSGAHDQRGLLRKEDLVLPEFLQLPAQGPSSEETPPQTKSAAQPIGGSLNSTTDSAL

SEQ ID NO: 897 - protein, 217 aa, Homo sapiens
MPTPHEAEKQITGPEEADRPPSMSSHDTASPAAPSRNPCCLCWCCCCSCSWNQERRRAWQASRESKLQPLPSCEVCATPSPEEVQSWAQSFDKLMHSPAGRSVFRAFLRTEYSEENMLFWLACEELKAEANQHVVDEKARLIYEDYVSILSPKEVSLDSRVREGINKKMQEPSAHTFDDAQLQIYTLMHRDSYPRFLSSPTYRALLLQGPSQSSSEA

SEQ ID NO: 898 - protein, 191 aa, Homo sapiens
MQSIKCVVVGDGAVGKTCLLICYTTNAFPKEYIPTVFDNYSAQSAVDGRTVNLNLWDTAGQEEYDRLRTLSYPQTNVFVICFSIASPPSYENVRHKWHPEVCHHCPDVPILLVGTKKDLRAQPDTLRRLKEQGQAPITPQQGQALAKQIHAVRYLECSALQQDGVKEVFAEAVRAVLNPTPIKRGRSCILL

SEQ ID NO: 899 - protein, 985 aa, Homo sapiens
MIRHAGAPARGDPTGPVPVVGKGEEEEEEDGMRLCLPANPKNCLPHRRGISILEKLIKTCPVWLQLSLGQAEVARILHRVVAGMFLVRRDSSSKQLVLCVHFPSLNESSAEVLEYTIKEEKSILYLEGSALVFEDIFRLIAFYCVSRDLLPFTLRLPQAILEASSFTDLETIANLGLGFWDSSLNPPQERGKPAEPPRDRAPGFPLVSSLRPTAHDANCACEIELSVGNDRLWFVNPIFIEDCSSALPTDQPPLGNCPARPLPPTSDATSPTSRWAPRRPPPPPPVLPLQPCSPAQPPVLPALAPAPACPLPTSPPVPAPHVTPHAPGPPDHPNQPPMMTCERLPCPTAGLGPLREEAMKPGAASSPLQQVPAPPLPAKKNLPTAPPRRRVSERVSLEDQSPGMAAEGDQLSLPPQGTSDGPEDTPRESTEQGQDTEVKASDPHSMPELPRTAKQPPVPPPRKKRISRQLASTLPAPLENAELCTQAMALETPTPGPPREGQSPASQAGTQHPPAQATAHSQSSPEFKGSLASLSDSLGVSVMATDQDSYSTSSTEEELEQFSSPSVKKKPSMILGKARHRLSFASFSSMFHAFLSNNRKLYKKVVELAQDKGSYFGSLVQDYKVYSLEMMARQTSSTEMLQEIRTMMTQLKSYLLQSTELKALVDPALHSEEELEAIVESALYKCVLKPLKEAINSCLHQIHSKDGSLQQLKENQLVILATTTTDLGVTTSVPEVPMMEKILQKFTSMHKAYSPEKKISILLKTCKLIYDSMALGNPGKPYGADDFLPVLMYVLARSNLTEMLLNVEYMMELMDPALQLGEGSYYLTTTYGALEHIKSYDKITVTRQLSVEVQDSIHRWERRRTLNKARASRSSVQDFICVSYLEPEQQARTLASRADTQAQALCAQCAEKFAVERPQAHRLFVLVDGRCFQLADDALPHCIKGYLLRSEPKRDFHFVYRPLDGGGGGGGGSPPCLVVREPNFL

SEQ ID NO: 900 - protein, 256 aa, Homo sapiens
MRPAALRGALLGCLCLALLCLGGADKRLRDNHEWKKLIMVQHWPETVCEKIQNDCRDPPDYWTIHGLWPDKSEGCNRSWPFNLEEIKDLLPEMRAYWPDVIHSFPNRSRFWKHEWEKHGTCAAQVDALNSQKKYFGRSLELYRELDLNSVLLKLGIKPSINYYQVADFKDALARVYGVIPKIQCLPPSQDEEVQTIGQIELCLTKQDQQLQNCTEPGEQPSPKQEVWLANGAAESRGLRVCEDGPVFYPPPKKTKH

SEQ ID NO: 901 - protein, 419 aa, Homo sapiens
MSCAGRAGPARLAALALLTCSLWPARADNASQEYYTALINVTVQEPGRGAPLTFRIDRGRYGLDSPKAEVRGQVLAPLPLHGVADHLGCDPQTRFFVPPNIKQWIALLQRGNCTFKEKISRAAFHNAVAVVIYNNKSKEEPVTMTHPGTGDIIAVMITELRGKDILSYLEKNISVQMTIAVGTRMPPKNFSRGSLVFVSISFIVLMIISSAWLIFYFIQKIRYTNARDRNQRRLGDAAKKAISKLTTRTVKKGDKETDPDFDHCAVCIESYKQNDVVRILPCKHVFHKSCVDPWLSEHCTCPMCKLNILKALGIVPNLPCTDNVAFDMERLTRTQAVNRRSALGDLAGDNSLGLEPLRTSGISPLPQDGELTPRTGEINIAVTKEWFIIASFGLLSALTLCYMIIRATASLNANEVEWF

SEQ ID NO: 902 - protein, 230 aa, Homo sapiens
MGQQISDQTQLVINKLPEKVAKHVTLVRESGSLTYEEFLGRVAELNDVTAKVASGQEKHLLFEVQPGSDSSAFWKVVVRVVCTKINKSSGIVEASRIMNLYQFIQLYKDITSQAAGVLAQSSTSEEPDENSSSVTSCQASLWMGRVKQLTDEEECCICMDGRADLILPCAHSFCQKCIDKWSDRHRNCPICRLQMTGANESWVVSDAPTEDDMANYILNMADEAGQPHRP

SEQ ID NO: 903 - protein, 358 aa, Homo sapiens
MAGCGEIDHSINMLPTNRKANESCSNTAPSLTVPECAICLQTCVHPVSLPCKHVFCYLCVKGASWLGKRCALCRQEIPEDFLDKPTLLSPEELKAASRGNGEYAWYYEGRNGWWQYDERTSRELEDAFSKGKKNTEMLIAGFLYVADLENMVQYRRNEHGRRRKIKRDIIDIPKKGVAGLRLDCDANTVNLARESSADGADSVSAQSGASVQPLVSSVRPLTSVDGQLTSPATPSPDASTSLEDSFAHLQLSGDNTAERSHRGEGEEDHESPSSGRVPAPDTSIEETESDASSDSEDVSAVVAQHSLTQQRLLVSNANQTVPDRSDRSGTDRSVAGGGTVSVSVRSRRPDGQCTVTEV

SEQ ID NO: 904 - protein, 732 aa, Homo sapiens
MGSEKDSESPRSTSLHAAAPDPKCRSGGRRRRLTLHSVFSASARGRRARAKPQAEPPPPAAQPPPAPAPAAAQGPPPEALPAEPAAEAEAEAAAAAAEPGFDDEEAAEGGGPGAEEVECPLCLVRLPPERAPRLLSCPHRSCRDCLRHYLRLEISESRVPISCPECSERLNPHDIRLLLADPPLMHKYEEFMLRRYLASDPDCRWCPAPDCGYAVIAYGCASCPKLTCEREGCQTEFCYHCKQIWHPNQTCDMARQQRAQTLRVRTKHTSGLSYGQESGPADDIKPCPRCSAYIIKMNDGSCNHMTCAVCGCEFCWLCMKEISDLHYLSPSGCTFWGKKPWSRKKKILWQLGTLIGAPVGISLIAGIAIPAMVIGIPVYVGRKIHSRYEGRKTSKHKRNLAITGGVTLSVIASPVIAAVSVGIGVPIMLAYVYGVVPISLCRGGGCGVSTANGKGVKIEFDEDDGPITVADAWRALKNPSIGESSIEGLTSVLSTSGSPTDGLSVMQGPYSETASFAALSGGTLSGGILSSGKGKYSRLEVQADVQKEIFPKDTASLGAISDNASTRAMAGSIISSYNPQDRECNNMEIQVDIEAKPSHYQLVSGSSTEDSLHVHAQMAENEEEGSGGGGSEEDPPCRHQSCEQKDCLASKPWDISLAQPESIRSDLESSDAQSDDVPDITSDECGSPRSHTAACPSTPRAQGAPSPSAHMNLSALAEGQTVLKPEGGEARV

SEQ ID NO: 905 - protein, 217 aa, Homo sapiens
MSSKVSRDTLYEAVREVLHGNQRKRRKFLETVELQISLKNYDPQKDKRFSGTVRLKSTPRPKFSVCVLGDQQHCDEAKAVDIPHMDIEALKKLNKNKKLVKKLAKKYDAFLASESLIKQIPRILGPGLNKAGKFPSLLTHNENMVAKVDEVKSTIKFQMKKVLCLAVAVGHVKMTDDELVYNIHLAVNFLVSLLKKNWQNVRALYIKSTMGKPQRLY

SEQ ID NO: 906 - protein, 128 aa, Homo sapiens [sequence omitted]

SEQ ID NO: 907 - protein, 735 aa, Homo sapiens
MPLAQLKEPWPLMELVPLDPENGQTSGEEAGLQPSKDEGVLKEISITHHVKAGSEKADPSHFELLKVLGQGSFGKVFLVRKVTRPDSGHLYAMKVLKKATLKVRDRVRTKMERDILADVNHPFVVKLHYAFQTEGKLYLILDFLRGGDLFTRLSKEVMFTEEDVKFYLAELALGLDHLHSLGIIYRDLKPENILLDEEGHIKLTDFGLSKEAIDHEKKAYSFCGTVEYMAPEVVNRQGHSHSADWWSYGVLMFEMLTGSLPFQGKDRKETMTLILKAKLGMPQFLSTEAQSLLRALFKRNPANRLGSGPDGAEEIKRHVFYSTIDWNKLYRREIKPPFKPAVAQPDDTFYFDTEFTSRTPKDSPGIPPSAGAHQLFRGFSFVATGLMEDDGKPRAPQAPLHSVVQQLHGKNLVFSDGYVVKETIGVGSYSECKRCVHKATNMEYAVKVIDKSKRDPSEEIEILLRYGQHPNIITLKDVYDDGKHVYLVTELMRGGELLDKILRQKFFSEREASFVLHTIGKTVEYLHSQGVVHRDLKPSNILYVDESGNPECLRICDFGFAKQLRAENGLLMTPCYTANFVAPEVLKRQGYDEGCDIWSLGILLYTMLAGYTPFANGPSDTPEEILTRIGSGKFTLSGGNWNTVSETAKDLVSKMLHVDPHQRLTAKQVLQHPWVTQKDKLPQSQLSHQDLQLVKGAMAATYSALNSSKPTPQLKPIESSILAQRRVRKLPSTTL

SEQ ID NO: 908 - protein, 740 aa, Homo sapiens
MPLAQLADPWQKMAVESPSDSAENGQQIMDEPMGEEEINPQTEEVSIKEIAITHHVKEGHEKADPSQFELLKVLGQGSFGKVFLVKKISGSDARQLYAMKVLKKATLKVRDRVRTKMERDILVEVNHPFIVKLHYAFQTEGKLYLILDFLRGGDLFTRLSKEVMFTEEDVKFYLAELALALDHLHSLGIIYRDLKPENILLDEEGHIKLTDFGLSKESIDHEKKAYSFCGTVEYMAPEVVNRRGHTQSADWWSFGVLMFEMLTGTLPFQGKDRKETMTMILKAKLGMPQFLSPEAQSLLRMLFKRNPANRLGAGPDGVEEIKRHSFFSTIDWNKLYRREIHPPFKPATGRPEDTFYFDPEFTAKTPKDSPGIPPSANAHQLFRGFSFVAITSDDESQAMQTVGVHSIVQQLHRNSIQFTDGYEVKEDIGVGSYSVCKRCIHKATNMEFAVKIIDKSKRDPTEEIEILLRYGQHPNIITLKDVYDDGKYVYVVTELMKGGELLDKILRQKFFSEREASAVLFTITKTVEYLHAQGVVHRDLKPSNILYVDESGNPESIRICDFGFAKQLRAENGLLMTPCYTANFVAPEVLKRQGYDAACDIWSLGVLLYTMLTGYTPFANGPDDTPEEILARIGSGKFSLSGGYWNSVSDTAKDLVSKMLHVDPHQRLTAALVLRHPWIVHWDQLPQYQLNRQDAPHLVKGAMAATYSALNRNQSPVLEPVGRSTLAQRRGIKKITSTAL

SEQ ID NO: 909 - protein, 361 aa, Homo sapiens
MWVLTPAAFAGKLLSVFRQPLSSLWRSLVPLFCWLRATFWLLATKRRKQQLVLRGPDETKEEEEDPPLPTTPTSVNYHFTRQCNYKCGFCFHTAKTSFVLPLEEAKRGLLLLKEAGMEKINFSGGEPFLQDRGEYLGKLVRFCKVELRLPSVSIVSNGSLIRERWFQNYGEYLDILAISCDSFDEEVNVLIGRGQGKKNHVENLQKLRRWCRDYRVAFKINSVINRFNVEEDMTEQIKALNPVRWKVFQCLLIEGENCGEDALREAERFVIGDEEFERFLERHKEVSCLVPESNQKMKDSYLILDEYMRFLNCRKGRKDPSKSILDVGVEEAIKFSGFDEKMFLKRGGKYIWSKADLKLDW

SEQ ID NO: 910 - protein, 236 aa, Homo sapiens
MAEPSAATQSHSISSSSFGAEPSAPGGGGSPGACPALGTKSCSSSCAVHDLIFWRDVKKTGFVFGTTLIMLLSLAAFSVISVVSYLILALLSVTISFRIYKSVIQAVQKSEEGHPFKAYLDVDITLSSEAFHNYMNAAMVHINRALKLIIRLFLVEDLVDSLKLAVFMWLMTYVGAVFNGITLLILAELLIFSVPIVYEKYKTQIDHYVGIARDQTKSIVEKIQAKLPGIAKKKAE

SEQ ID NO: 911 - protein, 246 aa, Homo sapiens
MVVDFWTWEQTFQELIQEAKPRATWTLKLDGNLQLDCLAQGWKQYQQRAFGWFRCSSCQRSWASAQVQILCHTYWEHWTSQGQVRMRLFGQRCQKCSWSQYEMPEFSSDSTMRILSNLVQHILKKYYGNGTRKSPEMPVILEVSLEGSHDTANCEACTLGICGQGLKSCMTKPSKSLLPHLKTGNSSPGIGAVYLANQAKNQSAEAKEAKGSGYEKLGPSRDPDPLNICVFILLLVFIVVKCFTSE

SEQ ID NO: 912 - protein, 462 aa, Homo sapiens
MDTKHFLPLDFSTQVNSSLTSPTGRGSMAAPSLHPSLGPGIGSPGQLHSPISTLSSPINGMGPPFSVISSPMGPHSMSVPTTPTLGFSTGSPQLSSPMNPVSSSEDIKPPLGLNGVLKVPAHPSGNMASFTKHICAICGDRSSGKHYGVYSCEGCKGFFKRTVRKDLTYTCRDNKDCLIDKRQRNRCQYCRYQKCLAMGMKREAVQEERQRGKDRNENEVESTSSANEDMPVERILEAELAVEPKTETYVEANMGLNPSSPNDPVTNICQAADKQLFTLVEWAKRIPHFSELPLDDQVILLRAGWNELLIASFSHRSIAVKDGILLATGLHVHRNSAHSAGVGAIFDRVLTELVSKMRDMQMDKTELGCLRAIVLFNPDSKGLSNPAEVEALREKVYASLEAYCKHKYPEQPGRFAKLLLRLPALRSIGLKCLEHLFFFKLIGDTPIDTFLMEMLEAPHQMT

SEQ ID NO: 913 - protein, 317 aa, Homo sapiens
  misc_feature (1)..(1): Xaa can be any naturally occurring amino acid
XLPAPAAALPGAPPPPPGVRGYPARARGLQGASGGARFPSSLSLPVPGKGGWVVSRAKFPALDSCEITTAHPRLCFAVSPPFSCSLPLPSLFPHSPLLGRPKRQAKPAADEGFWDCSVCTFRNSAEAFKCSICDVRKGTSTRKPRINSQLVAQQVAQQYATPPPPKKEKKEKVEKQDKEKPEKDKEISPSVTKKNTNKKTKPKSDILKDPPSEANSIQSANATTKTSETNHTSRPRLKNVDRSTAQQLAVTVGNVTVIITDFKEKTRSSSTSSSTVTSSAGSEQQNQSSSGSESTDKGSSRSSTPKGDMSAVNDESF

SEQ ID NO: 914 - protein, 953 aa, Homo sapiens
MAETLPGSGDSGPGTASLGPGVAETGTRRLSELRVIDLRAELKKRNLDTGGNKSVLMERLKKAVKEEGQDPDEIGIELEATSKKSAKRCVKGLKMEEEGTEDNGLEDDSRDGQEDMEASLENLQNMGMMDMSVLDETEVANSSAPDFGEDGTDGLLDSFCDSKEYVAAQLRQLPAQPPEHAVDGEGFKNTLETSSLNFKVTPDIEESLLEPENEKILDILGETCKSEPVKEESSELEQPFAQDTSSVGPDRKLAEEEDLFDSAHPEEGDLDLASESTAHAQSSKADSLLAVVKREPAEQPGDGERTDCEPVGLEPAVEQSSAASELAEASSEELAEAPTEAPSPEARDSKEDGRKFDFDACNEVPPAPKESSTSEGADQKMSSFKEEKDIKPIIKDEKGRVGSGSGRNLWVSGLSSTTRATDLKNLFSKYGKVVGAKVVTNARSPGARCYGFVTMSTSDEATKCISHLHRTELHGRMISVEKAKNEPAGKKLSDRKECEVKKEKLSSVDRHHSVEIKIEKTVIKKEEKIEKKEEKKPEDIKKEEKDQDELKPGPTNRSRVTKSGSRGMERTVVMDKSKGEPVISVKTTSRSKERSSKSQDRKSESKEKRDILSFDKIKEQRERERQRQREREIRETERRREREQREREQRLEAFHERKEKARLQRERLQLECQRQRLERERMERERLERERMRVERERRKEQERIHREREELRRQQEQLRYEQERRPGRRPYDLDRRDDAYWPEGKRVAMEDRYRADFPRPDHRFHDFDHRDRGQYQDHAIDRREGSRPMMGDHRDGQHYGDDRHGHGGPPERHGRDSRDGWGGYGSDKRLSEGRGLPPPPRGGRDWGEHNQRLEEHQARAWQGAMDAGAASREHARWQGGERGLSGPSGPGHMASRGGVAGRGGFAQGGHSQGHVVPGGGLEGGGVASQDRGSRVPHPHPHPPPYPHFTRRY

SEQ ID NO: 915 - protein, 763 aa, Homo sapiens
MDHLNEATQGKEHSEMSNNVSDPKGPPAKIARLEQNGSPLGRGRLGSTGAKMQGVPLKHSGHLMKTNLRKGTMLPVFCVVEHYENAIEYDCKEEHAEFVLVRKDMLFNQLIEMALLSLGYSHSSAAQAKGLIQVGKWNPVPLSYVTDAPDATVADMLQDVYHVVTLKIQLHSCPKLEDLPPEQWSHTTVRNALKDLLKDMNQSSLAKECPLSQSMISSIVNSTYYANVSAAKCQEFGRWYKHFKKTKDMMVEMDSLSELSQQGANHVNFGQQPVPGNTAEQPPSPAQLSHGSQPSVRTPLPNLHPGLVSTPISPQLVNQQLVMAQLLNQQYAVNRLLAQQSLNQQYLNHPPPVSRSMNKPLEQQVSTNTEVSSEIYQWVRDELKRAGISQAVFARVAFNRTQGLLSEILRKEEDPKTASQSLLVNLRAMQNFLQLPEAERDRIYQDERERSLNAASAMGPAPLISTPPSRPPQVKTATIATERNGKPENNTMNINASIYDEIQQEMKRAKVSQALFAKVAATKSQGWLCELLRWKEDPSPENRTLWENLSMIRRFLSLPQPERDAIYEQESNAVHHHGDRPPHIIHVPAEQIQQQQQQQQQQQQQQQAPPPPQPQQQPQTGPRLPPRQPTVASPAESDEENRQKTRPRTKISVEALGILQSFIQDVGLYPDEEAIQTLSAQLDLPKYTIIKFFQNQRYYLKHHGKLKDNSGLEVDVAEYKEEELLKDLEESVQDKNTNTLFSVKLEEELSVEGNTDINTDLKD

SEQ ID NO: 916 - protein, 399 aa, Homo sapiens
MAERRRHKKRIQEVGEPSKEEKAVAKYLRFNCPTKSTNMMGHRVDYFIASKAVDCLLDSKWAKAKKGEEALFTTRESVVDYCNRLLKKQFFHRALKVMKMKYDKDIKKEKDKGKAESGKEEDKKSKKENIKDEKTKKEKEKKKDGEKEESKKEETPGTPKKKETKKKFKLEPHDDQVFLDGNEVYVWIYDPVHFKTFVMGLILVIAVIAATLFPLWPAEMRVGVYYLSVGAGCFVASILLLAVARCILFLIIWLITGGRHHFWFLPNLTADVGFIDSFRPLYTHEYKGPKADLKKDEKSETKKQQKSDSEEKSDSEKKEDEEGKVGPGNHGTEGSGGERHSDTDSDRREDDRSQHSSGNGNDFEMITKEELEQQTDGDCEEDEEEENDGETPKSSHEKS

SEQ ID NO: 917 - protein, 862 aa, Homo sapiens; identical to SEQ ID NO: 174

SEQ ID NO: 918 - protein, 473 aa, Homo sapiens
MGAVLGVFSLASWVPCLCSGASCLLCSCCPNSKNSTVTRLIYAFILLLSTVVSYIMQRKEMETYLKKIPGFCEGGFKIHEADINADKDCDVLVGYKAVYRISFAMAIFFFVFSLLMFKVKTSKDLRAAVHNGFWFFKIAALIGIMVGSFYIPGGYFSSVWFVVGMIGAALFILIQLVLLVDFAHSWNESWVNRMEEGNPRLWYAALLSFTSAFYILSIICVGLLYTYYTKPDGCTENKFFISINLILCVVASIISIHPKIQEHQPRSGLLQSSLITLYTMYLTWSAMSNEPDRSCNPNLMSFITRITAPTLAPGNSTAVVPTPTPPSKSGSLLDSDNFIGLFVFVLCLLYSSIRTSTNSQVDKLTLSGSDSVILGDTTTSGASDEEDGQPRRAVDNEKEGVQYSYSLFHLMLCLASLYIMMTLTSWYSPDAKFQSMTSKWPAVWVKISSSWVCLLLYVWTLVAPLVLTSRDFS

SEQ ID NO: 919 - protein, 456 aa, Homo sapiens
MSAQCCAGQLACCCGSAGCSLCCDCCPRIRQSLSTRFMYALYFILVVVLCCIMMSTTVAHKMKEHIPFFEDMCKGIKAGDTCEKLVGYSAVYRVCFGMACFFFIFCLLTLKINNSKSCRAHIHNGFWFFKLLLLGAMCSGAFFIPDQDTFLNAWRYVGAVGGFLFIGIQLLLLVEFAHKWNKNWTAGTASNKLWYASLALVTLIMYSIATGGLVLMAVFYTQKDSCMENKILLGVNGGLCLLISLVAISPWVQNRQPHSGLLQSGVISCYVTYLTFSALSSKPAEVDEHGKNVTICVPDFGQDLYRDENLVTILGTSLLIGCILYSCLTSTTRSSSDALQGRYAAPELEIARCCFCFSPGGEDTEEQQPGKEGPRVIYDEKKGTVYIYSYFHFVFFLASLYVMMTVTNWFKWSPTLLPRLEYSGMILAHCNLHLPDVKRFSCLSLPSSWGYRHVPP

SEQ ID NO: 920 - protein, 314 aa, Homo sapiens
MLGKGGKRKFDEHEDGLEGKIVSPCDGPSKVSYTLQRQTIFNISLMKLYNHRPLTEPSLQKTVLINNMLRRIQEELKQEGSLRPMFTPSSQPTTEPSDSYREAPPAFSHLASPSSHPCDLGSTTPLEACLTPASLLEDDDDTFCTSQAMQPTAPTKLSPPALLPEKDSFSSALDEIEELCPTSTSTEAATAATDSVKGTSSEAGTQKLDGPQESRADDSKLMDSLPGNFEITTSTGFLTDLTLDDILFADIDTSMYDFDPCTSSSGTASKMAPVSADDLLKTLAPYSSQPVTPSQPFKMDLTELDHIMEVLVGS

SEQ ID NO: 921 - protein, 551 aa, Homo sapiens
MAEGENEVRWDGLCSRDSTTRETALENIRQTILRKTEYLRSVKETPHRPSDGLSNTESSDGLNKLLAHLLMLSKRCPFKDVREKSEFILKSIQELGIRIPRPLGQGPSRFIPEKEILQVGSEDAQMHALFADSFAALGRLDNITLVMVFHPQYLESFLKTQHYLLQMDGPLPLHYRHYIGIMAAARHQCSYLVNLHVNDFLHVGGDPKWLNGLENAPQKLQNLGELNKVLAHRPWLITKEHIEGLLKAEEHSWSLAELVHAVVLLTHYHSLASFTFGCGISPEIHCDGGHTFRPPSVSNYCICDITNGNHSVDEMPVNSAENVSVSDSFFEVEALMEKMRQLQECRDEEEASQEEMASRFEIEKRESMFVFSSDDEEVTPARAVSRHFEDTSYGYKDFSRHGMHVPTFRVQDYCWEDHGYSLVNRLYPDVGQLIDEKFHIAYNLTYNTMAMHKDVDTSMLRRAIWNYIHCMFGIRYDDYDYGEINQLLDRSFKVYIKTVVCTPEKVTKRMYDSFWRQFKHSEKVHVNLLLIEARMQAELLYALRAITRYMT

SEQ ID NO: 922 - protein, 2564 aa, Homo sapiens
MKQLQPQPPPKMGDFYDPEHPTPEEEENEAKIENVQKTGFIKGPMFKGVASSRFLPKGTKTKVNLEEQGRQKVSFSFSLTKKTLQNRFLTALGNEKQSDTPNPPAVPLQVDSTPKMKMEIGDTLSTAEESSPPKSRVELGKIHFKKHLLHVTSRPLLATTTAVASPPTHAAPLPAVIAESTTVDSPPSSPPPPPPPAQATTLSSPAPVTEPVALPHTPITVLMAAPVPLPVDVAVRSLKEPPIIIVPESLEADTKQDTISNSLEEHVTQILNEQADISSKKEDSHIGKDEEIPDSSKISLSCKKTGSKKKSSQSEGIFLGSESDEDSVRTSSSQRSHDLKFSASIEKERDFKKSSAPLKSEDLGKPSRSKTDRDDKYFSYSKLERDTRYVSSRCRSERERRRSRSHSRSERGSRTNLSYSRSERSHYYDSDRRYHRSSPYRERTRYSRPYTDNRARESSDSEEEYKKTYSRRTSSHSSSYRDLRTSSYSKSDRDCKTETSYLEMERRGKYSSKLERESKRTSENEAIKRCCSPPNELGFRRGSSYSKHDSSASRYKSTLSKPIPKSDKFKNSFCCTELNEEIKQSHSFSLQTPCSKGSELRMINKNPEREKAGSPAPSNRLNDSPTLKKLDELPIFKSEFITHDSHDSIKELDSLSKVKNDQLRSFCPIELNINGSPGAESDLATFCTSKTDAVLMTSDDSVTGSELSPLVKACMLSSNGFQNISRCKEKDLDDTCMLHKKSESPFRETEPLVSPHQDKLMSMPVMTVDYSKTVVKEPVDTRVSCCKTKDSDIYCTLNDSNPSLCNSEAENIEPSVMKISSNSFMNVHLESKPVICDSRNLTDHSKFACEEYKQSIGSTSSASVNHFDDLYQPIGSSGIASSLQSLPPGIKVDSLTLLKCGENTSPVLDAVLKSKKSSEFLKHAGKETIVEVGSDLPDSGKGFASRENRRNNGLSGKCLQEAQEEGNSILPERRGRPEISLDERGEGGHVHTSDDSEVVFSSCDLNLTMEDSDGVTYALKCDSSGHAPEIVSTVHEDYSGSSESSNDESDSEDTDSDDSSIPRNRLQSVVVVPKNSTLPMEETSPCSSRSSQSYRHYSDHWEDERLESRRHLYEEKFESIASKACPQTDKFFLHKGTEKNPEISFTQSSRKQIDNRLPELSHPQSDGVDSTSHTDVKSDPLGHPNSEETVKAKIPSRQQEELPIYSSDFEDVPNKSWQQTTFQNRPDSRLGKTELSFSSSCEIPHVDGLHSSEELRNLGWDFSQEKPSTTYQQPDSSYGACGGHKYQQNAEQYGGTRDYWQGNGYWDPRSGRPPGTGVVYDRTQGQVPDSLTDDREEEENWDQQDGSHFSDQSDKFLLSLQKDKGSVQAPEISSNSIKDTLAVNEKKDFSKNLEKNDIKDRGPLKKRRQEIESDSESDGELQDRKKVRVEVEQGETSVPPGSALVGPSCVMDDFRDPQRWKECAKQGKMPCYFDLIEENVYLTERKKNKSHRDIKRMQCECTPLSKDERAQGEIACGEDCLNRLLMIECSSRCPNGDYCSNRRFQRKQHADVEVILTEKKGWGLRAAKDLPSNTFVLEYCGEVLDHKEFKARVKEYARNKNIHYYFMALKNDEIIDATQKGNCSRFMNHSCEPNCETQKWTVNGQLRVGFFTTKLVPSGSELTFDYQFQRYGKEAQKCFCGSANCRGYLGGENRVSIRAAGGKMKKERSRKKDSVDGELEALMENGEGLSDKNQVLSLSRLMVRIETLEQKLTCLELIQNTHSQSCLKSFLERHGLSLLWIWMAELGDGRESNQKLQEEIIKTLEHLPIPTKNMLEESKVLPIIQRWSQTKTAVPPLSEGDGYSSENTSRAHTPLNTPDPSTKLSTEADTDTPKKLMFRRLKIISENSMDSAISDATSELEGKDGKEDLDQLENVPVEEEEELQSQQLLPQQLPECKVDSETNIEASKLPTSEPEADAEIEPKESNGTKLEEPINEETPSQDEEEGVSDVESERSQEQPDKTVDISDLATKLLDSWKDLKEVYRIPKKSQTEKENTTTERGRDAVGFRDQTPAPKTPNRSRERDPDKQTQNKEKRKRRSSLSPPSSAYERGTKRPDDRYDTPTSKKKVRIKDRNKLSTEERRKLFEQEVAQREAQKQQQQMQNLGMTSPLPYDSLGYNAPHHPFAGYPPGYPMQAYVDPSNPNAGKVLLPTPSMDPVCSPAPYDHAQPLVGHSTEPLSAPPPVPVVPHVAAPVEVSSSQYVAQSDGVVHQDSSVAVLPVPAPGPVQGQNYSVWDSNQQSVSVQQQYSPAQSQATIYYQGQTCPTVYGVTSPYSQTTPPIVQSYAQPSLQYIQGQQIFTAHPQGVVVQPAAAVTTIVAPGQPQPLQPSEMVVTNNLLDLPPPSPPKPKTIVLPPNWKTARDPEGKIYYYHVITRQTQWDPPTWESPGDDASLEHEAEMDLGTPTYDENPMKASKKPKTAEADTSSELAKKSKEVFRKEMSQFIVQCLNPYRKPDCKVGRITTTEDFKHLARKLTHGVMNKELKYCKNPEDLECNENVKHKTKEYIKKYMQKFGAVYKPKEDTELE

SEQ ID NO: 923 - protein, 575 aa, Homo sapiens
MNGPALQPSSPSSAPSASPAAAPRGWSEFCELHAVAAARELARQYWLFAREHPQHAPLRAELVSLQFTDLFQRYFCREVRDGRAPGRDYRDTGRGPPAKAEASPEPGPGPAAPGLPKARSSEELAPPRPPGPCSFQHFRRSLRHIFRRRSAGELPAAHTAAAPGTPGEAAETPARPGLAKKFLPWSLAREPPPEALKEAVLRYSLADEASMDSGARWQRGRLALRRAPGPDGPDRVLELFDPPKSSRPKLQAACSSIQEVRWCTRLEMPDNLYTFVLKVKDRTDIIFEVGDEQQLNSWMAELSECTGRGLESTEAEMHIPSALEPSTSSSPRGSTDSLNQGASPGGLLDPACQKTDHFLSCYPWFHGPISRVKAAQLVQLQGPDAHGVFLVRQSETRRGEYVLTFNFQGIAKHLRLSLTERGQCRVQHLHFPSVVDMLHHFQRSPIPLECGAACDVRLSSYVVVVSQPPGSCNTVLFPFSLPHWDSESLPHWGSELGLPHLSSSGCPRGLSPEGLPGRSSPPEQIFHLVPSPEELANSLQHLEHEPVNRARDSDYEMDSSSRSHLRAIDNQYTPL

SEQ ID NO: 924 - protein, 703 aa, Homo sapiens
MTAVGRRCPALGSRGAAGEPEAGSDYVKFSKEKYILDSSPEKLHKELEEELKLSSTDLRSHAWYHGRIPREVSETLVQRNGDFLIRDSLTSLGDYVLTCRWRNQALHFKINKVVVKAGESYTHIQYLFEQESFDHVPALVRYHVGSRKAVSEQSGAIIYCPVNRTFPLRYLEASYGLGQGSSKPASPVSPSGPKGSHMKRRSVTMTDGLTADKVTRSDGCPTSTSLPRPRDSIRSCALSMDQIPDLHSPMSPISESPSSPAYSTVTRVHAAPAAPSATALPASPVARRSSEPQLCPGSAPKTHGESDKGPHTSPSHTLGKASPSPSLSSYSDPDSGHYCQLQPPVRGSREWAATETSSQQARSYGERLKELSENGAPEGDWGKTFTVPIVEVTSSFNPATFQSLLIPRDNRPLEVGLLRKVKELLAEVDARTLARHVTKVDCLVARILGVTKEMQTLMGVRWGMELLTLPHGRQLRLDLLERFHTMSIMLAVDILGCTGSAEERAALLHKTIQLAAELRGTMGNMFSFAAVMGALDMAQISRLEQTWVTLRQRHTEGAILYEKKLKPFLKSLNEGKEGPPLSNTTFPHVLPLITLLECDSAPPEGPEPWGSTEHGVEVVLAHLEAARTVAHHGGLYHTNAEVKLQGFQARPELLEVFSTEFQMRLLWGSQGASSSQARRYEKFDKVLTALSHKLEPAVRSSEL

SEQ ID NO: 925 - protein, 504 aa, Homo sapiens
MEPAGPAPGRLGPLLCLLLAASCAWSGVAGEEELQVIQPDKSVLVAAGETATLRCTATSLIPVGPIQWFRGAGPGRELIYNQKEGHFPRVTTVSDLTKRNNMDFSIRIGNITPADAGTYYCVKFRKGSPDDVEFKSGAGTELSVRAKPSAPVVSGPAARATPQHTVSFTCESHGFSPRDITLKWFKNGNELSDFQTNVDPVGESVSYSIHSTAKVVLTREDVHSQVICEVAHVTLQGDPLRGTANLSETIRVPPTLEVTQQPVRAENQVNVTCQVRKFYPQRLQLTWLENGNVSRTETASTVTENKDGTYNWMSWLLVNVSAHRDDVKLTCQVEHDGQPAVSKSHDLKVSAHPKEQGSNTAAENTGSNERNIYIVVGVVCTLLVALLMAALYLVRIRQKKAQGSTSSTRLHEPEKNAREITQDTNDITYADLNLPKGKKPAPQAAEPNNHTEYASIQTSPQPASEDTLTYADLDMVHLNRTPKQPAPKPEPSFSEYASVQVPRK

SEQ ID NO: 926 - protein, 398 aa, Homo sapiens
MPVPASWPHLPSPFLLMTLLLGRLTGVAGEDELQVIQPEKSVSVAAGESATLRCAMTSLIPVGPIMWFRGAGAGRELIYNQKEGHFPRVTTVSELTKRNNLDFSISISNITPADAGTYYCVKFRKGSPDDVEFKSGAGTELSVRAKPSAPVVSGPAVRATPEHTVSFTCESHGFSPRDITLKWFKNGNELSDFQTNVDPAGDSVSYSIHSTARVVLTRGDVHSQVICEIAHITLQGDPLRGTANLSEAIRVPPTLEVTQQPMRAENQANVTCQVSNFYPRGLQLTWLENGNVSRTETASTLIENKDGTYNWMSWLLVNTCAHRDDVVLTCQVEHDGQQAVSKSYALEISAHQKEHGSDITHEAALAPTAPLLVALLLGPKLLLVVGVSAIYICWKQKA

SEQ ID NO: 927 - protein, 710 aa, Homo sapiens
MQGKKPGGSSGGGRSGELQGDEAQRNKKKKKKVSCFSNIKIFLVSECALMLAQGTVGAYLVSVLTTLERRFNLQSADVGVIASSFEIGNLALILFVSYFGARGHRPRLIGCGGIVMALGALLSALPEFLTHQYKYEAGEIRWGAEGRDVCAANGSGGDEGPDPDLICRNRTATNMMYLLLIGAQVLLGIGATPVQPLGVSYIDDHVRRKDSSLYIGILFTMLVFGPACGFILGSFCTKIYVDAVFIDTSNLDITPDDPRWIGAWWGGFLLCGALLFFSSLLMFGFPQSLPPHSEPAMESEQAMLSEREYERPKPSNGVLRHPLEPDSSASCFQQLRVIPKVTKHLLSNPVFTCIILAACMEIAVVAGFAAFLGKYLEQQFNLTTSSANQLLGMTAIPCACLGIFLGGLLVKKLSLSALGAIRMAMLVNLVSTACYVSFLFLGCDTGPVAGVTVPYGNSTAPGSALDPYSPCNNNCECQTDSFTPVCGADGITYLSACFAGCNSTNLTGCACLTTVPAENATVVPGKCPSPGCQEAFLTFLCVMCICSLIGAMAQTPSVIILIRTVSPELKSYALGVLFLLLRLLGFIPPPLIFGAGIDSTCLFWSTFCGEQGACVLYDNVVYRYLYVSIAIALKSFAFILYTTTWQCLRKNYKRYIKNHEGGLSTSEFFASTLTLDNLGRDPVPANQTHRTKFIYNLEDHEWCENMESVL

SEQ ID NO: 928 - protein, 552 aa, Homo sapiens
MDNMSITNTPTSNDACLSIVHSLMCHRQGGESETFAKRAIESLVKKLKEKKDELDSLITAITTNGAHPSKCVTIQRTLDGRLQVAGRKGFPHVIYARLWRWPDLHKNELKHVKYCQYAFDLKCDSVCVNPYHYERVVSPGIDLSGLTLQSNAPSSMMVKDEYVHDFEGQPSLSTEGHSIQTIQHPPSNRASTETYSTPALLAPSESNATSTANFPNIPVASTSQPASILGGSHSEGLLQIASGPQPGQQQNGFTGQPATYHHNSTTTWTGSRTAPYTPNLPHHQNGHLQHHPPMPPHPGHYWPVHNELAFQPPISNHPAPEYWCSIAYFEMDVQVGETFKVPSSCPIVTVDGYVDPSGGDRFCLGQLSNVHRTEAIERARLHIGKGVQLECKGEGDVWVRCLSDHAVFVQSYYLDREAGRAPGDAVHKIYPSAYIKVFDLRQCHRQMQQQAATAQAAAAAQAAAVAGNIPGPGSVGGIAPAISLSAAAGIGVDDLRRLCILRMSFVKGWGPDYPRQSIKETPCWIEIHLHRALQLLDEVLHTMPIADPQPLD

SEQ ID NO: 929 - protein, 88 aa, Homo sapiens
MSIMDHSPTTGVVTVIVILIAIAALGALILGCWCYLRLQRISQSEDEESIVGDGETKEPFLLVQYSAKGPCVERKAKLMTPNGPEVHG

SEQ ID NO: 930 - protein, 765 aa, Homo sapiens
MAGFKRGYDGKIAGLYDLDKTLGRGHFAVVKLARHVFTGEKVAVKVIDKTKLDTLATGHLFQEVRCMKLVQHPNIVRLYEVIDTQTKLYLILELGDGGDMFDYIMKHEEGLNEDLAKKYFAQIVHAISYCHKLHVVHRDLKPENVVFFEKQGLVKLTDFGFSNKFQPGKKLTTSCGSLAYSAPEILLGDEYDAPAVDIWSLGVILFMLVCGQPPFQEANDSETLTMIMDCKYTVPSHVSKECKDLITRMLQRDPKRRASLEEIENHPWLQGVDPSPATKYNIPLVSYKNLSEEEHNSIIQRMVLGDIADRDAIVEALETNRYNHITATYFLLAERILREKQEKEIQTRSASPSNIKAQFRQSWPTKIDVPQDLEDDLTATPLSHATVPQSPARAADSVLNGHRSKGLCDSAKKDDLPELAGPALSTVPPASLKPTASGRKCLFRVEEDEEEDEEDKKPMSLSTQVVLRRKPSVTNRLTSRKSAPVLNQIFEEGESDDEFDMDENLPPKLSRLKMNIASPGTVHKRYHRRKSQGRGSSCSSSETSDDDSESRRRLDKDSGFTYSWHRRDSSEGPPGSEGDGGGQSKPSNASGGVDKASPSENNAGGGSPSSGSGGNPTNTSGTTRRCAGPSNSMQLASRSAGELVESLKLMSLCLGSQLHGSTKYIIDPQNGLSFSSVKVQEKSTWKMCISSTGNAGQVPAVGGIKFFSDHMADTTTELERIKSKNLKNNVLQLPLCEKTISVNIQRNPKEGLLCASSPASCCHVI

SEQ ID NO: 931 - protein, 528 aa, Homo sapiens
MADEDGEGIHPSAPHRNGGGGGGGGSGLHCAGNGGGGGGGPRVVRIVKSESGYGFNVRGQVSEGGQLRSINGELYAPLQHVSAVLPGGAADRAGVRKGDRILEVNHVNVEGATHKQVVDLIRAGEKELILTVLSVPPHEADNLDPSDDSLGQSFYDYTEKQAVPISVPRYKHVEQNGEKFVVYNVYMAGRQLCSKRYREFAILHQNLKREFANFTFPRLPGKWPFSLSEQQLDARRRGLEEYLEKVCSIRVIGESDIMQEFLSESDENYNGVSDVELRVALPDGTTVTVRVKKNSTTDQVYQAIAAKVGMDSTTVNYFALFEVISHSFVRKLAPNEFPHKLYIQNYTSAVPGTCLTIRKWLFTTEEEILLNDNDLAVTYFFHQAVDDVKKGYIKAEEKSYQLQKLYEQRKMVMYLNMLRTCEGYNEIIFPHCACDSRRKGHVITAISITHFKLHACTEEGQLENQVIAFEWDEMQRWDTDEEGMAFCFEYARGEKKPRWVKIFTPYFNYMHECFERVFCELKWRKEEY

SEQ ID NO: 932 - protein, 550 aa, Homo sapiens
MVGEEKMSLRNRLSKSRENPEEDEDQRNPAKESLETPSNGRIDIKQLIAKKIKLTAEAEELKPFFMKEVGSHFDDFVTNLIEKSASLDNGGCALTTFSVLEGEKNNHRAKDLRAPPEQGKIFIARRSLLDELLEVDHIRTIYHMFIALLILFILSTLVVDYIDEGRLVLEFSLLSYAFGKFPTVVWTWWIMFLSTFSVPYFLFQHWATGYSKSSHPLIRSLFHGFLFMIFQIGVLGFGPTYVVLAYTLPPASRFIIIFEQIRFVMKAHSFVRENVPRVLNSAKEKSSTVPIPTVNQYLYFLFAPTLIYRDSYPRNPTVRWGYVAMKFAQVFGCFFYVYYIFERLCAPLFRNIKQEPFSARVLVLCVFNSILPGVLILFLTFFAFLHCWLNAFAEMLRFGDRMFYKDWWNSTSYSNYYRTWNVVVHDWLYYYAYKDFLWFFSKRFKSAAMLAVFAVSAVVHEYALAVCLSFFYPVLFVLFMFFGMAFNFIVNDSRKKPIWNVLMWTSLFLGNGVLLCFYSQEWYARQHCPLKNPTFLDYVRPRSWTCRYVF

SEQ ID NO: 933 - protein, 2214 aa, Homo sapiens
MATRSSRRESRLPFLFTLVALLPPGALCEVWTQRLHGGSAPLPQDRGFLVVQGDPRELRLWARGDARGASRADEKPLRRKRSAALQPEPIKVYGQVSLNDSHNQMVVHWAGEKSNVIVALARDSLALARPKSSDVYVSYDYGKSFKKISDKLNFGLGNRSEAVIAQFYHSPADNKRYIFADAYAQYLWITFDFCNTLQGFSIPFRAADLLLHSKASNLLLGFDRSHPNKQLWKSDDFGQTWIMIQEHVKSFSWGIDPYDKPNTIYIERHEPSGYSTVFRSTDFFQSRENQEVILEEVRDFQLRDKYMFATKVVHLLGSEQQSSVQLWVSFGRKPMRAAQFVTRHPINEYYIADASEDQVFVCVSHSNNRTNLYISEAEGLKFSLSLENVLYYSPGGAGSDTLVRYFANEPFADFHRVEGLQGVYIATLINGSMNEENMRSVITFDKGGTWEFLQAPAFTGYGEKINCELSQGCSLHLAQRLSQLLNLQLRRMPILSKESAPGLIIATGSVGKNLASKTNVYISSSAGARWREALPGPHYYTWGDHGGIITAIAQGMETNELKYSTNEGETWKTFIFSEKPVFVYGLLTEPGEKSTVFTIFGSNKENVHSWLILQVNATDALGVPCTENDYKLWSPSDERGNECLLGHKTVFKRRTPHATCFNGEDFDRPVVVSNCSCTREDYECDFGFKMSEDLSLEVCVPDPEFSGKSYSPPVPCPVGSTYRRTRGYRKISGDTCSGGDVEARLEGELVPCPLAEENEFILYAVRKSIYRYDLASGATEQLPLTGLRAAVALDFDYEHNCLYWSDLALDVIQRLCLNGSTGQEVIINSGLETVEALAFEPLSQLLYWVDAGFKKIEVANPDGDFRLTIVNSSVLDRPRALVLVPQEGVMFWTDWGDLKPGIYRSNMDGSAAYHLVSEDVKWPNGISVDDQWIYWTDAYLECIERITFSGQQRSVILDNLPHPYAIAVFKNEIYWDDWSQLSIFRASKYSGSQMEILANQLTGLMDMKIFYKGKNTGSNACVPRPCSLLCLPKANNSRSCRCPEDVSSSVLPSGDLMCDCPQGYQLKNNTCVKQENTCLRNQYRCSNGNCINSIWWCDFDNDCGDMSDERNCPTTICDLDTQFRCQESGTCIPLSYKCDLEDDCGDNSDESHCEMHQCRSDEYNCSSGMCIRSSWVCDGDNDCRDWSDEANCTAIYHTCEASNFQCRNGHCIPQRWACDGDTDCQDGSDEDPVNCEKKCNGFRCPNGTCIPSSKHCDGLRDCSDGSDEQHCEPLCTHFMDFVCKNRQQCLFHSMVCDGIIQCRDGSDEDAAFAGCSQDPEFHKVCDEFGFQCQNGVCISLIWKCDGMDDCGDYSDEANCENPTEAPNCSRYFQFRCENGHCIPNRWKCDRENDCGDWSDEKDCGDSHILPFSTPGPSTCLPNYYRCSSGTCVMDTWVCDGYRDCADGSDEEACPLLANVTAASTPTQLGRCDRFEFECHQPKTCIPNWKRCDGHQDCQDGRDEANCPTHSTLTCMSREFQCEDGEACIVLSERCDGFLDCSDESDEKACSDELTVYKVQNLQWTADFSGDVTLTWMRPKKMPSASCVYNVYYRVVGESIWKTLETHSNKTNTVLKVLKPDTTYQVKVQVQCLSKAHNTNDFVTLRTPEGLPDAPRNLQLSLPREAEGVIVGHWAPPIHTHGLIREYIVEYSRSGSKMWASQRAASNFTEIKNLLVNTLYTVRVAAVTSRGIGNWSDSKSITTIKGKVIPPPDIHIDSYGENYLSFTLTMESDIKVNGYVVNLFWAFDTHKQERRTLNFRGSILSHKVGNLTAHTSYEISAWAKTDLGDSPLAFEHVMTRGVRPPAPSLKAKAINQTAVECTWTGPRNVVYGIFYATSFLDLYRNPKSLTTSLHNKTVIVSKDEQYLFLVRVVVPYQGPSSDYVVVKMIPDSRLPPRHLHVVHTGKTSVVIKWESPYDSPDQDLLYAVAVKDLIRKTDRSYKVKSRNSTVEYTLNKLEPGGKYHIIVQLGNMSKDSSIKITTVSLSAPDALKIITENDHVLLFWKSLALKEKHFNESRGYEIHMFDSAMNITAYLGNTTDNFFKISNLKMGHNYTFTVQARCLFGNQICGEPAILLYDELGSGADASATQAARSTDVAAVVVPILFLILLSLGVGFAILYTKHRRLQSSFTAFANSHYSSRLGSAIFSSGDDLGEDDEDAPMITGFSDDVPMVIA

SEQ ID NO: 934 - protein, 1332 aa, Homo sapiens [sequence omitted]

SEQ ID NO: 935 - protein, 781 aa, Homo sapiens
MTAPEKPVKQEEMAALDVDSGGGGGGGGGHGEYLQQQQQHGNGAVAAAAAAQDTQPSPLALLAATCSKIGPPSPGDDEEEAAAAAGAPAAAGATGDLASAQLGGAPNRWEVLSATPTTIKDEAGNLVQIPSAATSSGQYVLPLQNLQNQQIFSVAPGSDSSNGTVSSVQYQVIPQIQSADGQQVQIGFTGSSDNGGINQESSQIQIIPGSNQTLLASGTPSANIQNLIPQTGQVQVQGVAIGGSSFPGQTQVVANVPLGLPGNITFVPINSVDLDSLGLSGSSQTMTAGINADGHLINTGQAMDSSDNSERTGERVSPDINETNTDTDLFVPTSSSSQLPVTIDSTGILQQNTNSLTTSSGQVHSSDLQGNYIQSPVSEETQAQNIQVSTAQPVVQHLQLQESQQPTSQAQIVQGITPQTIHGVQASGQNISQQALQNLQLQLNPGTFLIQAQTVTPSGQVTWQTFQVQGVQNLQNLQIQNTAAQQITLTPVQTLTLGQVAAGGAFTSTPVSLSTGQLPNLQTVTVNSIDSAGIQLHPGENADSPADIRIKEEEPDPEEWQLSGDSTLNTNDLTHLRVQVVDEEGDQQHQEGKRLRRVACTCPNCKEGGGRGTNLGKKKQHICHIPGCGKVYGKTSHLRAHLRWHSGERPFVCNWMYCGKRFTRSDELQRHRRTHTGEKKFVCPECSKRFMRSDHLAKHIKTHQNKKGIHSSSTVLASVEAARDDTLITAGGTTLILANIQQGSVSGIGTVNTSATSNQDILTNTEIPLQLVTVSGNETME

SEQ ID NO: 936 - protein, 361 aa, Homo sapiens
MYGKGKSNSSAVPSDSQAREKLALYVYEYLLHVGAQKSAQTFLSEIRWEKNITLGEPPGFLHSWWCVFWDLYCAAPERRETCEHSSEAKAFHDYSAAAAPSPVLGNIPPGDGMPVGPVPPGFFQPFMSPRYPGGPRPPLRIPNQALGGVPGSQPLLPSGMDPTRQQGHPNMGGPMQRMTPPRGMVPLGPQNYGGAMRPPLNALGGPGMPGMNMGPGGGRPWPNPTNANSIPYSSASPGNYVGPPGGGGPPGTPIMPSPADSTNSGDNMYTLMNAVPPGPNRPNFPMGPGSDGPMGGLGGMESHHMNGSLGSGDMDSISKNSPNNMSLSNQPGTPRDDGEMGGNFLNPFQSESYSPSMTMSV

SEQ ID NO: 937 - protein, 1256 aa, Homo sapiens
MDRPLSSSAEAEEELEWQVASRRRKAWAKCRSSWQASETEDLSTEATTQDEEEDEEEDLPGAQLPAAGGRGNVPNEKIAIWLKDCRTPLGASLDEQSSSTLKGVLVRNGGSFEDDLSLGAEANHLHESDAQIENCNNILAKERRLQFHQKGRSMNSTGSGKSSGTVSSVSELLELYEEDPEEILYNLGFGRDEPDIASKIPSRFFNSSSFAKGIDIKVFLSAQMQRMEVENPNYALTSRFRQIEVLTTVANAFSSLYSQVSGTPLQRIGSMSSVTSNKETDPPPPLTRSNTANRLMKTLSKLNLCVDKTEKGESSSPSPSAEKGKILNVSVIEESGNKNDQKSQKIMKKKESSSMLATVKEEVSGSSAAVTENADSDRISDEANSNFNQGTENEQSKETQSHESKLGEESGIVESKLDSDFNISSHSELENSSELKSVHISTPEKEPCAPLTIPSIRNIMTQQKDSFEMEEVQSTEGEAPHVPATYQLGLTKSKRDHLLRTASQHSDSSGFAEDSTDCLSLNHLQVQESLQAMGSSADSCDSETTVTSLGEDLATPTAQDQPYFNESEEESLVPLQKGLEKAAAVADKRKSGSQDFPQCNTIENTGTKQSTCSPGDHIIEITEVEEDLFPAETVELLREASAESDVGKSSESEFTQYTTHHILKSLASIEAKCSDMSSENTTGPPSSMDRVNTALQRAQMKVCSLSNQRMGRSLLKSKDLLKQRYLFAKAGYPLRRSQSLPTTLLSPVRVVSSVNVRLSPGKETRCSPPSFTYKYTPEEEQELEKRVMEHDGQSLVKSTIFISPSSVKKEEAPQSEAPRVEECHHGRTPTCSRLAPPPMSQSTCSLHSIHSEWQERPLCEHTRTLSTHSVPNISGATCSAFASPFGCPYSHRHATYPYRVCSVNPPSAIEMQLRRVLHDIRNSLQNLSQYPMMRGPDPAAAPYSTQKSSVLPLYENTFQELQVMRRSLNLFRTQMMDLELAMLRQQTMVYHHMTEEERFEVDQLQGLRNSVRMELQDLELQLEERLLGLEEQLRAVRMPSPFRSSALMGMCGSRSADNLSCPSPLNVMEPVTELMQEQSYLKSELGLGLGEMGFEIPPGESSESVFSQATSESSSVCSGPSHANRRTGVPSTASVGKSKTPLVARKKVFRASVALTPTAPSRTGSVQTPPDLESSEEVDAAEGAPEVVGPKSEVEEGHGKLPSMPAAEEMHKNVEQDELQQVIREVGMDPISCVILELSMICTGGGVICALEDTCC

SEQ ID NO: 938 - protein, 369 aa, Homo sapiens
MDPRKVNELRAFVKMCKQDPSVLHTEEMRFLREWVESMGGKVPPATQKAKSEENTKEEKPDSKKVEEDLKADEPSSEESDLEIDKEGVIEPDTDAPQEMGDENAEITEEMMDQANDKKVAAIEALNDGELQKAIDLFTDAIKLNPRLAILYAKRASVFVKLQKPNAAIRDCDRAIEINPDSAQPYKWRGKAHRLLGHWEEAAHDLALACKLDYDEDASAMLKEVQPRAQKIAEHRRKYERKREEREIKERIERVKKAREEHERAQREEEARRQSGAQYGSFPGGFPGGMPGNFPGGMPGMGGGMPGMAGMPGLNEILSDPEVLAAMQDPEVMVAFQDVAQNPANMSKYQSNPKVMNLISKLSAKFGGQA

SEQ ID NO: 939 - protein, 340 aa, Homo sapiens
MVTLRKRTLKVLTFLVLFIFLTSFFLNYSHTMVATTWFPKQMVLELSENLKRLIKHRPCTCTHCIGQRKLSAWFDERFNQTMQPLLTAQNALLEDDTYRWWLRLQREKKPNNLNDTIKELFRVVPGNVDPMLEKRSVGCRRCAVVGNSGNLRESSYGPEIDSHDFVLRMNKAPTAGFEADVGTKTTHHLVYPESFRELGDNVSMILVPFKTIDLEWVVSAITTGTISHTYIPVPAKIRVKQDKILIYHPAFIKYVFDNWLQGHGRYPSTGILSVIFSMHVCDEVDLYGFGADSKGNWHHYWENNPSAGAFRKTGVHDADFESNVTATLASINKIRIFKGR

SEQ ID NO: 940 - protein, 525 aa, Homo sapiens [sequence omitted]

SEQ ID NO: 941 - protein, 750 aa, Homo sapiens
MSQWYELQQLDSKFLEQVHQLYDDSFPMEIRQYLAQWLEKQDWEHAANDVSFATIRFHDLLSQLDDQYSRFSLENNFLLQHNIRKSKRNLQDNFQEDPIQMSMIIYSCLKEERKILENAQRFNQAQSGNIQSTVMLDKQKELDSKVRNVKDKVMCIEHEIKSLEDLQDEYDFKCKTLQNREHETNGVAKSDQKQEQLLLKKMYLMLDNKRKEVVHKIIELLNVTELTQNALINDELVEWKRRQQSACIGGPPNACLDQLQNWFTIVAESLQQVRQQLKKLEELEQKYTYEHDPITKNKQVLWDRTFSLFQQLIQSSFVVERQPCMPTHPQRPLVLKTGVQFTVKLRLLVKLQELNYNLKVKVLFDKDVNERNTVKGFRKFNILGTHTKVMNMEESTNGSLAAEFRHLQLKEQKNAGTRTNEGPLIVTEELHSLSFETQLCQPGLVIDLETTSLPVVVISNVSQLPSGWASILWYNMLVAEPRNLSFFLTPPCARWAQLSEVLSWQFSSVTKRGLNVDQLNMLGEKLLGPNASPDGLIPWTRFCKENINDKNFPFWLWIESILELIKKHLLPLWNDGCIMGFISKERERALLKDQQPGTFLLRFSESSREGAITFTWVERSQNGGEPDFHAVEPYTKKELSAVTFPDIIRNYKVMAAENIPENPLKYLYPNIDKDHAFGKYYSRPKEAPEPMELDGPKGTGYIKTELISVSEVHPSRLQTTDNLLPMSPEEFDEVSRIVGSVEFDSMMNTV

SEQ ID NO: 942 - protein, 794 aa, Homo sapiens
MAGWIQAQQLQGDALRQMQVLYGQHFPIEVRHYLAQWIESQPWDAIDLDNPQDRAQATQLLEGLVQELQKKAEHQVGEDGFLLKIKLGHYATQLQKTYDRCPLELVRCIRHILYNEQRLVREANNCSSPAGILVDAMSQKHLQINQTFEELRLVTQDTENELKKLQQTQEYFIIQYQESLRIQAQFAQLAQLSPQERLSRETALQQKQVSLEAWLQREAQTLQQYRVELAEKHQKTLQLLRKQQTIILDDELIQWKRRQQLAGNGGPPEGSLDVLQSWCEKLAEIIWQNRQQIRRAEHLCQQLPIPGPVEEMLAEVNATITDIISALVTSTFIIEKQPPQVLKTQTKFAATVRLLVGGKLNVHMNPPQVKATIISEQQAKSLLKNENTRNECSGEILNNCCVMEYHQATGTLSAHFRNMSLKRIKRADRRGAESVTEEKFTVLFESQFSVGSNELVFQVKTLSLPVVVIVHGSQDHNATATVLWDNAFAEPGRVPFAVPDKVLWPQLCEALNMKFKAEVQSNRGLTKENLVFLAQKLFNNSSSHLEDYSGLSVSWSQFNRENLPGWNYTFWQWFDGVMEVLKKHHKPHWNDGAILGFVNKQQAHDLLINKPDGTFLLRFSDSEIGGITIAWKFDSPERNLWNLKPFTTRDFSIRSLADRLGDLSYLIYVFPDRPKDEVFSKYYTPVLAKAVDGYVKPQIKQVVPEFVNASADAGGSSATYMDQAPSPAVCPQAPYNMYPQNPDHVLDQDGEFDLDETMDVARHVEELLRRPMDSLDSRLSPPAGLFTSARGSLS

SEQ ID NO: 943 - protein, 787 aa, Homo sapiens
MAVWIQAQQLQGEALHQMQALYGQHFPIEVRHYLSQWIESQAWDSVDLDNPQENIKATQLLEGLVQELQKKAEHQVGEDGFLLKIKLGHYATQLQNTYDRCPMELVRCIRHILYNEQRLVREANNGSSPAGSLADAMSQKHLQINQTFEELRLVTQDTENELKKLQQTQEYFIIQYQESLRIQAQFGPLAQLSPQERLSRETALQQKQVSLEAWLQREAQTLQQYRVELAEKHQKTLQLLRKQQTIILDDELIQWKRRQQLAGNGGPPEGSLDVLQSWCEKLAEIIWQNRQQIRRAEHLCQQLPIPGPVEEMLAEVNATITDIISALVTSTFIIEKQPPQVLKTQTKFAATVRLLVGGKLNVHMNPPQVKATIISEQQAKSLLKNENTRNDYSGEILNNCCVMEYHQATGTLSAHFRNMSLKRIKRSDRRGAESVTEEKFTILFESQFSVGGNELVFQVKTLSLPVVVIVHGSQDNNATATVLWDNAFAEPGRVPFAVPDKVLWPQLCEALNMKFKAEVQSNRGLTKENLVFLAQKLFNNSSSHLEDYSGLSVSWSQFNRENLPGRNYTFWQWFDGVMEVLKKHLKPHWNDGAILGFVNKQQAHDLLINKPDGTFLLRFSDSEIGGITIAWKFDSQERMFWNLMPFTTRDFSIRSLADRLGDLNYLIYVFPDRPKDEVYSKYYTPVPCESATAKAVDGYVKPQIKQVVPEFVNASADAGGGSATYMDQAPSPAVCPQAHYNMYPQNPDSVLDTDGDFDLEDTMDVARRVEELLGRPMDSQWIPHAQS

SEQ ID NO: 944 - protein, 464 aa, Homo sapiens
MAMTAGTTTTFPMSNHTRERVTVAKLTLENFYSNLILQHEERETRQKKLEVAMEEEGLADEEKKLRRSQHARKETEFLRLKRTRLGLDDFESLKVIGRGAFGEVRLVQKKDTGHIYAMKILRKSDMLEKEQVAHIRAERDILVEADGAWVVKMFYSFQDKRNLYLIMEFLPGGDMMTLLMKKDTLTEEETQFYISETVLAIDAIHQLGFIHRDIKPDNLLLDAKGHVKLSDFGLCTGLKKAHRTEFYRNLTHNPPSDFSFQNMNSKRKAETWKKNRRQLAYSTVGTPDYIAPEVFMQTGYNKLCDWWSLGVIMYEMLIGYPPFCSETPQETYRKVMNWKETLVFPPEVPISEKAKDLILRFCIDSENRIGNSGVEEIKGHPFFEGVDWEHIRERPAAIPIEIKSIDDTSNFDDFPESDILQPVPNTTEPDYKSKDWVFLNYTYKRFEGLTQRGSIPTYMKAGKL

SEQ ID NO: 945 - protein, 249 aa, Homo sapiens
MSLEDPFFVVRGEVQKAVNTARGLYQRWCELLQESAAVGREELDWTTNELRNGLRSIEWDLEDLEETIGIVEANPGKFKLPAGDLQERKVFVERMREAVQEMKDHMVSPTAVAFLERNNREILAGKPAAQKSPSDLLDASAVSATSRYIEEQQATQQLIMDEQDQQLEMVSGSIQVLKHMSGRVGEELDEQGIMLDAFAQEMDHTQSRMDGVLRKLAKVSHMTSDRRQWCAIAVLVGVLLLVLILLFSL

SEQ ID NO: 946 - protein, 289 aa, Homo sapiens
MKDRLEQLKAKQLTQDDDTDAVEIAIDNTAFMDEFFSEIEETRLNIDKISEHVEEAKKLYSIILSAPIPEPKTKDDLEQLTTEIKKRANNVRNKLKSMEKHIEEDEVRSSADLRIRKSQHSVLSRKFVEVMTKYNEAQVDFRERSKGRIQRQLEITGKKTTDEELEEMLESGNPAIFTSGIIDSQISKQALSEIEGRHKDIVRLESSIKELHDMFMDIAMLVENQGEMLDNIELNVMHTVDHVEKARDETKKAVKYQSQARKKLIIIIVLVVVLLGILALIIGLSVGLN

SEQ ID NO: 947 - protein, 255 aa, Homo sapiens
MSMEDPFFVVKGEVQKAVNTAQGLFQRWTELLQDPSTATREEIDWTTNELRNNLRSIEWDLEDLDETISIVEANPRKFNLDATELSIRKAFITSTRQVVRDMKDQMSTSSVQALAERKNRQALLGDSGSQNWSTGTTDKYGRLDRELQRANSHFIEEQQAQQQLIVEQQDEQLELVSGSIGVLKNMSQRIGGELEEQAVMLEDFSHELESTQSRLDNVMKKLAKVSHMTSDRRQWCAIAILFAVLLVVLILFLVL

SEQ ID NO: 948 - protein, 259 aa, Homo sapiens
MAPNIYLVRQRISRLGQRMSGFQINLNPLKEPLGFIKVLEWIASIFAFATCGGFKGQTEIQVNCPPAVTENKTVTATFGYPFRLNEASFQPPPGVNICDVNWKDYVLIGDYSSSAQFYVTFAVFVFLYCIAALLLYVGYTSLYLDSRKLPMIDFVVTLVATFLWLVSTSAWAKALTDIKIATGHNIIDELPPCKKKAVLCYFGSVTSMGSLNVSVIFGFLNMILWGGNAWFVYKETSLHSPSNTSAPHSQGGIPPPTGI

SEQ ID NO: 949 - protein, 808 aa, Homo sapiens
MAELLASAGSACSWDFPRAPPSFPPPAASRGGLGGTRSFRPHRGAESPRPGRDRDGVRVPMASSRCPAPRGCRCLPGASLAWLGTVLLLLADWVLLRTALPRIFSLLVPTALPLLRVWAVGLSRWAVLWLGACGVLRATVGSKSENAGAQGWLAALKPLAAALGLALPGLALFRELISWGAPGSADSTRLLHWGSHPTAFVVSYAAALPAAALWHKLGSLWVPGGQGGSGNPVRRLLGCLGSETRRLSLFLVLVVLSSLGEMAIPFFTGRLTDWILQDGSADTFTRNLTLMSILTIASAVLEFVGDGIYNNTMGHVHSHLQGEVFGAVLRQETEFFQQNQTGNIMSRVTEDTSTLSDSLSENLSLFLWYLVRGLCLLGIMLWGSVSLTMVTLITLPLLFLLPKKVGKWYQLLEVQVRESLAKSSQVAIEALSAMPTVRSFANEEGEAQKFREKLQEIKTLNQKEAVAYAVNSWTTSISGMLLKVGILYIGGQLVTSGAVSSGNLVTFVLYQMQFTQAVEVLLSIYPRVQKAVGSSEKIFEYLDRTPRCPPSGLLTPLHLEGLVQFQDVSFAYPNRPDVLVLQGLTFTLRPGEVTALVGPNGSGKSTVAALLQNLYQPTGGQLLLDGKPLPQYEHRYLHRQVAAVGQEPQVFGRSLQENIAYGLTQKPTMEEITAAAVKSGAHSFISGLPQGYDTEVDEAGSQLSGGQRQAVALARALIRKPCVLILDDATSALDANSQLQVEQLLYESPERYSRSVLLITQHLSLVEQADHILFLEGGAIREGGTHQQLMEKKGCYWAMVQAPADAPE

SEQ ID NO: 950 - protein, 575 aa, Homo sapiens
MSHAAEPARDGVEASAEGPRAVFVLLEERRPADSAQLLSLNSLLPESGIVADIELENVLDPDSFYELKSQPLPLRSSLPISLQATPATPATLSASSSAGGSRTPAMSSSSSSRVLLRQQLMRAQAQEQERRERREQAAAAPFPSPAPASPAISVVGVSAGGHTLSRPPPAQVPREVLKVQTHLENPTRYHLQQARRQQVKQYLSTTLGPKLASQALTPPPGPASAQPLPAPEAAHTTGPTGSAPNSPMALLTIGSSSEKEIDDVIDEIISLESSYNDEMLSYLPGGTTGLQLPSTLPVSGNLLDVYSSQGVATPAITVSNSCPAELPNIKREISETEAKALLKERQKKDNHNLIERRRRFNINDRIKELGTLIPKSSDPEMRWNKGTILKASVDYIRKLQKEQQRSKDLESRQRSLEQANRSLQLRIQELELQAQIHGLPVPPTPGLLSLATTSASDSLKPEQLDIEEEGRPGAATFHVGGGPAQNAPHQQPPAPPSDALLDLHFPSDHLGDLGDPFHLGLEDILMEEEEGVVGGLSGGALSPLRAASDPLLSSVSPAVSKASSRRSSFSMEEES

SEQ ID NO: 951 - protein, 476 aa, Homo sapiens
MASRIGLRMQLMREQAQQEEQRERMQQQAVMHYMQQQQQQQQQQLGGPPTPAINTPVHFQSPPPVPGEVLKVQSYLENPTSYHLQQSQHQKVREYLSETYGNKFAAHISPAQGSPKPPPAASPGVRAGHVLSSSAGNSAPNSPMAMLHIGSNPERELDDVIDNIMRLDDVLGYINPEMQMPNTLPLSSSHLNVYSSDPQVTASLVGVTSSSCPADLTQKRELTDAESRALAKERQKKDNHNLIERRRRFNINDRIKELGMLIPKANDLDVRWNKGTILKASVDYIRRMQKDLQKSRELENHSRRLEMTNKQLWLRIQELEMQARVHGLPTTSPSGMNMAELAQQVVKQELPSEEGPGEALMLGAEVPDPEPLPALPPQAPLPLPTQPPSPFHHLDFSHSLSFGGREDEGPPGYPEPLAPGHGSPFPSLSKKDLDLMLLDDSLLPLASDPLLSTMSPEASKASSRRSSFSMEEGDVL

SEQ ID NO: 952 - protein, 683 aa, Homo sapiens
MALFVRLLALALALALGPAATLAGPAKSPYQLVLQHSRLRGRQHGPNVCAVQKVIGTNRKYFTNCKQWYQRKICGKSTVISYECCPGYEKVPGEKGCPAALPLSNLYETLGVVGSTTTQLYTDRTEKLRPEMEGPGSFTIFAPSNEAWASLPAEVLDSLVSNVNIELLNALRYHMVGRRVLTDELKHGMTLTSMYQNSNIQIHHYPNGIVTVNCARLLKADHHATNGVVHLIDKVISTITNNIQQIIEIEDTFETLRAAVAASGLNTMLEGNGQYTLLAPTNEAFEKIPSETLNRILGDPEALRDLLNNHILKSAMCAEAIVAGLSVETLEGTTLEVGCSGDMLTINGKAIISNKDILATNGVIHYIDELLIPDSAKTLFELAAESDVSTAIDLFRQAGLGNHLSGSERLTLLAPLNSVFKDGTPPIDAHTRNLLRNHIIKDQLASKYLYHGQTLETLGGKKLRVFVYRNSLCIENSCIAAHDKRGRYGTLFTMDRVLTPPMGTVMDVLKGDNRFSMLVAAIQSAGLTETLNREGVYTVFAPTNEAFRALPPRERSRLLGDAKELANILKYHIGDEILVSGGIGALVRLKSLQGDKLEVSLKNNVVSVNKEPVAEPDIMATNGVVHVITNVLQPPANRPQERGDELADSALEIFKQASAFSRASQRSVRLAPVYQKLLERMKH

SEQ ID NO: 953 - protein, 567 aa, Homo sapiens
MGRGLLRGLWPLHIVLWTRIASTIPPHVQKSVNNDMIVTDNNGAVKFPQLCKFCDVRFSTCDNQKSCMSNCSITSICEKPQEVCVAVWRKNDENITLETVCHDPKLPYHDFILEDAASPKCIMKEKKKPGETFFMCSCSSDECNDNIIFSEEYNTSNPDLLLVIFQVTGISLLPPLGVAISVIIIFYCYRVNRQQKLSSTWETGKTRKLMEFSEHCAIILEDDRSDISSTCANNINHNTELLPIELDTLVGKGRFAEVYKAKLKQNTSEQFETVAVKIFPYEEYASWKTEKDIFSDINLKHENILQFLTAEERKTELGKQYWLITAFHAKGNLQEYLTRHVISWEDLRKLGSSLARGIAHLHSDHTPCGRPKMPIVHRDLKSSNILVKNDLTCCLCDFGLSLRLDPTLSVDDLANSGQVGTARYMAPEVLESRMNLENVESFKQTDVYSMALVLWEMTSRCNAVGEVKDYEPPFGSKVREHPCVESMKDNVLRDRGRPEIPSFWLNHQGIQMVCETLTECWDHDPEARLTAQCVAERFSELEHLDRLSGRSCSEEKIPEDGSLNTTK

SEQ ID NO: 954 - protein, 437 aa, Homo sapiens
MRFVVALVLLNVAAAGAVPLLATESVKQEEAGVRPSAGNVSTHPSLSQRPGGSTKSHPEPQTPKDSPSKSSAEAQTPEDTPNKSGAEAKTQKDSSNKSGAEAKTQKGSTSKSGSEAQTTKDSTSKSHPELQTPKDSTGKSGAEAQTPEDSPNRSGAEAKTQKDSPSKSGSEAQTTKDVPNKSGADGQTPKDGSSKSGAEDQTPKDVPNKSGAEKQTPKDGSNKSGAEEQGPIDGPSKSGAEEQTSKDSPNKVVPEQPSRKDHSKPISNPSDNKELPKADTNQLADKGKLSPHAFKTESGEETDLISPPQEEVKSSEPTEDVEPKEAEDDDTGPEEGSPPKEEKEKMSGSASSENREGTLSDSTGSEKDDLYPNGSGNGSAESSHFFAYLVTAAILVAVLYIAHHNKRKIIAFVLEGKRSKVTRRPKASDYQRLDQKS

SEQ ID NO: 955 - protein, 1591 aa, Homo sapiens
MGNAESQHVEHEFYGEKHASLGRKHTSRSLRLSHKTRRTRHASSGKVIHRNSEVSTRSSSTPSIPQSLAENGLEPFSQDGTLEDFGSPIWVDRVDMGLRPVSYTDSSVTPSVDSSIVLTAASVQSMPDTEESRLYGDDATYLAEGGRRQHSYTSNGPTFMETASFKKKRSKSADIWREDSLEFSLSDLSQEHLTSNEEILGSAEEKDCEEARGMETRASPRQLSTCQRANSLGDLYAQKNSGVTANGGPGSKFAGYCRNLVSDIPNLANHKMPPAAAEETPPYSNYNTLPCRKSHCLSEGATNPQISHSNSMQGRRAKTTQDVNAGEGSEFADSGIEGATTDTDLLSRRSNATNSSYSPTTGRAFVGSDSGSSSTGDAARQGVYENFRRELEMSTTNSESLEEAGSAHSDEQSSGTLSSPGQSDILLTAAQGTVRKAGALAVKNFLVHKKNKKVESATRRKWKHYWVSLKGCTLFFYESDGRSGIDHNSIPKHAVWVENSIVQAVPEHPKKDFVFCLSNSLGDAFLFQTTSQTELENWITAIHSACATAVARHHHKEDTLRLLKSEIKKLEQKIDMDEKMKKMGEMQLSSVTDSKKKKTILDQIFVWEQNLEQFQMDLFRFRCYLASLQGGELPNPKRLLAFASRPTKVAMGRLGIFSVSSFHALVAARTGETGVRRRTQAMSRSASKRRSRFSSLWGLDTTSKKKQGRPSINQVFGEGTEAVKKSLEGIFDDIVPDGKREKEVVLPNVHQHNPDCDIWVHEYFTPSWFCLPNNQPALTVVRPGDTARDTLELICKTHQLDHSAHYLRLKFLIENKMQLYVPQPEEDIYELLYKEIEICPKVTQSIHIEKSDTAADTYGFSLSSVEEDGIRRLYVNSVKETGLASKKGLKAGDEILEINNRAADALNSSMLKDFLSQPSLGLLVRTYPELEEGVELLESPPHRVDGPADLGESPLAFLTSNPGHSLCSEQGSSAETAPEETEGPDLESSDETDHSSKSTEQVAAFCRSLHEMNPSDQSPSPQDSTGPQLATMRQLSDADKLRKVICELLETERTYVKDLNCLMERYLKPLQKETFLTQDELDVLFGNLTEMVEFQVEFLKTLEDGVRLVPDLEKLEKVDQFKKVLFSLGGSFLYYADRFKLYSAFCASHTKVPKVLVKAKTDTAFKAFLDAQNPKQQHSSTLESYLIKPIQRILKYPLLLRELFALTDAESEEHYHLDVAIKTMNKVASHINEMQKIHEEFGAVFDQLIAEQTGEKKEVADLSMGDLLLHTTVIWLNPPASLGKWKKEPELAAFVFKTAVVLVYKDGSKQKKKLVGSHRLSIYEDWDPFRFRHMIPTEALQVRALASADAEANAVCEIVHVKSESEGRPERVFHLCCSSPESRKDFLKAVHSILRDKHRRQLLKTESLPSSQQYVPFGGKRLCALKGARPAMSRAVSAPSKSLGRRRRRLARNRFTIDSDAVSASSPEKESQQPPGGGDTDRWVEEQFDLAQYEEQDDIKETDILSDDDEFCESVKGASVDRDLQERLQATSISQRERGRKTLDSHASRMAQLKKQAALSGINGGLESASEEVIWVRREDFAPSRKLNTEI

SEQ ID NO: 956 - protein, 772 aa, Homo sapiens; identical to SEQ ID NO: 181

SEQ ID NO: 957 - protein, 773 aa, Homo sapiens
MIRDLSKMYPQTRHPAPHQPAQPFKFTISESCDRIKEEFQFLQAQYHSLKLECEKLASEKTEMQRHYVMYYEMSYGLNIEMHKQAEIVKRLNAICAQVIPFLSQEHQQQVVQAVERAKQVTMAELNAIIGQQLQAQHLSHGHGLPVPLTPHPSGLQPPAIPPIGSSAGLLALSSALGGQSHLPIKDEKKHHDNDHQRDRDSIKSSSVSPSASFRGAEKHRNSADYSSESKKQKTEEKEIAARYDSDGEKSDDNLVVDVSNEDPSSPRGSPAHSPRENGLDKTRLLKKDAPISPASIASSSSTPSSKSKELSLNEKSTTPVSKSNTPTPRTDAPTPGSNSTPGLRPVPGKPPGVDPLASSLRTPMAVPCPYPTPFGIVPHAGMNGELTSPGAAYAGLHNISPQMSAAAAAAAAAAAYGRSPVVGFDPHHHMRVPAIPPNLTGIPGGKPAYSFHVSADGQMQPVPFPPDALIGPGIPRHARQINTLNHGEVVCAVTISNPTRHVYTGGKGCVKVWDISHPGNKSPVSQLDCLNRDNYIRSCRLLPDGRTLIVGGEASTLSIWDLAAPTPRIKAELTSSAPACYALAISPDSKVCFSCCSDGNIAVWDLHNQTLVRQFQGHTDGASCIDISNDGTKLWTGGLDNTVRSWDLREGRQLQQHDFTSQIFSLGYCPTGEWLAVGMENSNVEVLHVTKPDKYQLHLHESCVLSLKFAHCGKWFVSTGKDNLLNAWRTPYGASIFQSKESSSVLSCDISVDDKYIVTGSGDKKATVYEVIY

SEQ ID NO: 958 - protein, 784 aa, Homo sapiens
MPHTLWMVWVLGVIISLSKEESSNQASLSCDRNGICKGSSGSLNSIPSGLTEAVKSLDLSNNRITYISNSDLQRCVNLQALVLTSNGINTIEEDSFSSLGSLEHLDLSYNYLSNLSSSWFKPLSSLTFLNLLGNPYKTLGETSLFSHLTKLQILRVGNMDTFTKIQRKDFAGLTFLEELEIDASDLQSYEPKSLKSIQNVSHLILHMKQHILLLEIFVDVTSSVECLELRDTDLDTFHFSELSTGETNSLIKKFTFRNVKITDESLFQVMKLLNQISGLLELEFDDCTLNGVGNFRASDNDRVIDPGKVETLTIRRLHIPRFYLFYDLSTLYSLTERVKRITVENSKVFLVPCLLSQHLKSLEYLDLSENLMVEEYLKNSACEDAWPSLQTLILRQNHLASLEKTGETLLTLKNLTNIDISKNSFHSMPETCQWPEKMKYLNLSSTRIHSVTGCIPKTLEILDVSNNNLNLFSLNLPQLKELYISRNKLMTLPDASLLPMLLVLKISRNAITTFSKEQLDSFHTLKTLEAGGNNFICSCEFLSFTQEQQALAKVLIDWPANYLCDSPSHVRGQQVQDVRLSVSECHRTALVSGMCCALFLLILLTGVLCHRFHGLWYMKMMWAWLQAKRKPRKAPSRNICYDAFVSYSERDAYWVENLMVQELENFNPPFKLCLHKRDFIPGKWIIDNIIDSIEKSHKTVFVLSENFVKSEWCKYELDFSHFRLFDENNDAAILILLEPIEKKAIPQRFCKLRKIMNTKTYLEWPMDEAQREGFWVNLRAAIKS

SEQ ID NO: 959 - protein, 221 aa, Homo sapiens
MAGGVLPLRGLRALCRVLLFLSQFCILSGGESTEIPPYVMKCPSNGLCSRLPADCIDCTTNFSCTYGKPVTFDCAVKPSVTCVDQDFKSQKNFIINMTCRFCWQLPETDYECTNSTSCMTVSCPRQRYPANCTVRDHVHCLGNRTFPKMLYCNWTGGYKWSTALALSITLGGFGADRFYLGQWREGLGKLFSFGGLGIWTLIDVLLIGVGYVGPADGSLYI

SEQ ID NO: 960 - protein, 311 aa, Homo sapiens
MSNPSAPPPYEDRNPLYPGPPPPGGYGQPSVLPGGYPAYPGYPQPGYGHPAGYPQPMPPTHPMPMNYGPGHGYDGEERAVSDSFGPGEWDDRKVRHTFIRKVYSIISVQLLITVAIIAIFTFVEPVSAFVRRNVAVYYVSYAVFVVTYLILACCQGPRRRFPWNIILLTLFTFAMGFMTGTISSMYQTKAVIIAMIITAVVSISVTIFCFQTKVDFTSCTGLFCVLGIVLLVTGIVTSIVLYFQYVYWLHMLYAALGAICFTLFLAYDTQLVLGNRKHTISPEDYITGALQIYTDIIYIFTFVLQLMGDRN

SEQ ID NO: 961 - protein, 238 aa, Homo sapiens
MYAPGGAGLPGGRRRRSPGGSALPKQPERSLASALPGALSITALCTALAEPAWLHIHGGTCSRQELGVSDVLGYVHPDLLKDFCMNPQTVLLLRVIAAFCFLGILCSLSAFLLDVFGPKHPALKITRRYAFAHILTVLQCATVIGFSYWASELILAQQQQHKKYHGSQVYVTFAVSFYLVAGAGGASILATAANLLRHYPTEEEEQALELLSEMEENEPYPAEYEVINQFQPPPAYTP

SEQ ID NO: 962 - protein, 226 aa, Homo sapiens
MTVQRLVAAAVLVALVSLILNNVAAFTSNWVCQTLEDGRRRSVGLWRSCWLVDRTRGGPSPGARAGQVDAHDCEALGWGSEAAGFQESRGTVKLQFDMMRACNLVATAALTAGQLTFLLGLVGLPLLSPDAPCWEEAMAAAFQLASFVLVIGLVTFYRIGPYTNLSWSCYLNIGACLLATLAAAMLIWNILHKREDCMAPRVIVISRSLTARFRRGLDNDYVESPC

SEQ ID NO: 963 - protein, 455 aa, Homo sapiens
MGLSTVPDLLLPLVLLELLVGIYPSGVIGLVPHLGDREKRDSVCPQGKYIHPQNNSICCTKCHKGTYLYNDCPGPGQDTDCRECESGSFTASENHLRHCLSCSKCRKEMGQVEISSCTVDRDTVCGCRKNQYRHYWSENLFQCFNCSLCLNGTVHLSCQEKQNTVCTCHAGFFLRENECVSCSNCKKSLECTKLCLPQIENVKGTEDSGTTVLLPLVIFFGLCLLSLLFIGLMYRYQRWKSKLYSIVCGKSTPEKEGELEGTTTKPLAPNPSFSPTPGFTPTLGFSPVPSSTFTSSSTYTPGDCPNFAAPRREVAPPYQGADPILATALASDPIPNPLQKWEDSAHKPQSLDTDDPATLYAVVENVPPLRWKEFVRRLGLSDHEIDRLELQNGRCLREAQYSMLATWRRRTPRREATLELLGRVLRDMDLLGCLEDIEEALCGPAALPPAPSLLR

SEQ ID NO: 964 - protein, 250 aa, Homo sapiens [sequence omitted]

SEQ ID NO: 965 - protein, 636 aa, Homo sapiens
MEGRGPYRIYDPGGSVPSGEASAAFERLVKENSRLKEKMQGIKMLGELLEESQMEATRLRQKAEELVKDNELLPPPSPSLGSFDPLAELTGKDSNVTASPTAPACPSDKPAPVQKPPSSGTSSEFEVVTPEEQNSPESSSHANAMALGPLPREDGNLMLHLQRLETTLSVCAEEPDHGQLFTHLGRMALEFNRLASKVHKNEQRTSILQTLCEQLRKENEALKAKLDKGLEQRDQAAERLREENLELKKLLMSNGNKEGASGRPGSPKMEGTGKKAVAGQQQASVTAGKVPEVVALGAAEKKVKMLEQQRSELLEVNKQWDQHFRSMKQQYEQKITELRQKLADLQKQVTDLEAEREQKQRDFDRKLLLAKSKIEMEETDKEQLTAEAKELRQKVKYLQDQLSPLTRQREYQEKEIQRLNKALEEALSIQTPPSSPPTAFGSPEGAGALLRKQELVTQNELLKQQVKIFEEDFQRERSDRERMNEEKEELKKQVEKLQAQVTLSNAQLKAFKDEEKAREALRQQKRKAKASGERYHVEPHPEHLCGAYPYAYPPMPAMVPHHGFEDWSQIRYPPPPMAMEHPPPLPNSRLFHLPEYTWRLPCGGVRNPNQSSQVMDPPTARPTEPESPKNDREGPQ

SEQ ID NO: 966 - protein, 1038 aa, Homo sapiens
MQPEEGTGWLLELLSEVQLQQYFLRLRDDLNVTRLSHFEYVKNEDLEKIGMGRPGQRRLWEAVKRRKALCKRKSWMSKVFSGKRLEAEFPPHHSQSTFRKTSPAPGGPAGEGPLQSLTCLIGEKDLRLLEKLGDGSFGVVRRGEWDAPSGKTVSVAVKCLKPDVLSQPEAMDDFIREVNAMHSLDHRNLIRLYGVVLTPPMKMVTELAPLGSLLDRLRKHQGHFLLGTLSRYAVQVAEGMGYLESKRFIHRDLAARNLLLATRDLVKIGDFGLMRALPQNDDHYVMQEHRKVPFAWCAPESLKTRTFSHASDTWMFGVTLWEMFTYGQEPWIGLNGSQILHKIDKEGERLPRPEDCPQDIYNVMVQCWAHKPEDRPTFVALRDFLLEAQPTDMRALQDFEEPDKLHIQMNDVITVIEGRAENYWWRGQNTRTLCVGPFPRNVVTSVAGLSAQDISQPLQNSFIHTGHGDSDPRHCWGFPDRIDELYLGNPMDPPDLLSVELSTSRPPQHLGGVKKPTYDPVSEDQDPLSSDFKRLGLRKPGLPRGLWLAKPSARVPGTKASRGSGAEVTLIDFGEEPVVPALRPCAPSLAQLAMDACSLLDETPPQSPTRALPRPLHPTPVVDWDARPLPPPPAYDDVAQDEDDFEICSINSTLVGAGVPAGPSQGQTNYAFVPEQARPPPPLEDNLFLPPQGGGKPPSSAQTAEIFQALQQECMRQLQAPAGSPAPSPSPGGDDKPQVPPRVPIPPRPTRPHVQLSPAPPGEEETSQWPGPASPPRVPPREPLSPQGSRTPSPLVPPGSSPLPPRLSSSPGKTMPTTQSFASDPKYATPQVIQAPGPRAGPCILPIVRDGKKVSSTHYYLLPERPSYLERYQRFLREAQSPEEPTPLPVPLLLPPPSTPAPAAPTATVRPMPQAALDPKANFSTNNSNPGARPPPPRATARLPQRGCPGDGPEAGRPADKIQMAMVHGVTTEECQAALQCHGWSVQRAAQYLKVEQLFGLGLRPRGECHKVLEMFDWNLEQAGCHLLGSWGPAHHKR

SEQ ID NO: 967 - protein, 1723 aa, Homo sapiens
MREKEQEREEQLMEDKKRKKEDKKKKEATQKVTEQKTKVPEVTKPSLSQPTAASPIGSSPSPPVNGGNNAKRVAVPNGQPPSAARYMPREVPPRFRCQQDHKVLLKRGQPPPPSCMLLGGGAGPPPCTAPGANPNNAQVTGALLQSESGTAPDSTLGGAAASNYANSTWGSGASSNNGTSPNPIHIWDKVIVDGSDMEEWPCIASKDTESSSENTTDNNSASNPGSEKSTLPGSTTSNKGKGSQCQSASSGNECNLGVWKSDPKAKSVQSSNSTTENNNGLGNWRNVSGQDRIGPGSGFSNFNPNSNPSAWPALVQEGTSRKGALETDNSNSSAQVSTVGQTSREQQSKMENAGVNFVVSGREQAQIHNTDGPKNGNTNSLNLSSPNPMENKGMPFGMGLGNTSRSTDAPSQSTGDRKTGSVGSWGAARGPSGTDTVSGQSNSGNNGNNGKEREDSWKGASVQKSTGSKNDSWDNNNRSTGGSWNFGPQDSNDNKWGEGNKMTSGVSQGEWKQPTGSDELKIGEWSGPNQPNSSTGAWDNQKGHPLPENQGNAQAPCWGRSSSSTGSEVGGQSTGSNHKAGSSDSHNSGRRSYRPTHPDCQAVLQTLLSRTDLDPRVLSNTGWGQTQIKQDTVWDIEEVPRPEGKSDKGTEGWESAATQTKNSGGWGDAPSQSNQMKSGWGELSASTEWKDPKNTGGWNDYKNNNSSNWGGGRPDEKTPSSWNENPSKDQGWGGGRQPNQGWSSGKNGWGEEVDQTKNSNWESSASKPVSGWGEGGQNEIGTWGNGGNASLASKGGWEDCKRSPAWNETGRQPNSWNKQHQQQQPPQQPPPPQPEASGSWGGPPPPPPGNVRPSNSSWSSGPQPATPKDEEPSGWEEPSPQSISRKMDIDDGTSAWGDPNSYNYKNVNLWDKNSQGGPAPREPNLPTPMTSKSASDSKSMQDGWGESDGPVTGARHPSWEEEEDGGVWNTTGSQGSASSHNSASWGQGGKKQMKCSLKGGNNDSWMNPLAKQFSNMGLLSQTEDNPSSKMDLSVGSLSDKKFDVDKRAMNLGDFNDIMRKDRSGFRPPNSKDMGTTDSGPYFEKGGSHGLFGNSTAQSRGLHTPVQPLNSSPSLRAQVPPQFISPQVSASMLKQFPNSGLSPGLFNVGPQLSPQQIAMLSQLPQIPQFQLACQLLLQQQQQQQLLQNQRKISQAVRQQQEQQLARMVSALQQQQQQQQRQPGMKHSPSHPVGPKPHLDNMVPNALNVGLPDLQTKGPIPGYGSGFSSGGMDYGMVGGKEAGTESRFKQWTSMMEGLPSVATQEANMHKNGAIVAPGKTRGGSPYNQFDIIPGDTLGGHTGPAGDSWLPAKSPPTNKIGSKSSNASWPPEFQPGVPWKGIQNIDPESDPYVTPGSVLGGTATSPIVDTDHQLLRDNTTGSNSSLNTSLPSPGAWPYSASDNSFTNVHSTSAKFPDYKSTWSPDPIGHNPTHLSNKMWKNHISSRNTTPLPRPPPGLTNPKPSSPWSSTAPRSVRGWGTQDSRLASASTWSDGGSVRPSYWLVLHNLTPQIDGSTLRTICMQHGPLLTFHLNLTQGTALIRYSTKQEAAKAQTALHMCVLGNTTILAEFATDDEVSRFLAQAQPPTPAATPSAPAAGWQSLETGQNQSDPVGPALNLFGGSTGLGQWSSSAGGSSGADLAGASLWGPPNYSSSLWGVPTVEDPHRMGSPAPLLPGDLLGGGSDSI

SEQ ID NO: 968 - protein, 1045 aa, Homo sapiens
MGSQPPLGSPLSREEGEAPPPAPASEGRRRSRRVRLRGSCRHRPSFLGCRELAASAPARPAPASSEIMASAAKEFKMDNFSPKAGTSKLQQTVPADASPDSKCPICLDRFDNVSYLDRCLHKFCFRCVQEWSKNKAECPLCKQPFDSIFHSVRAEDDFKEYVLRPSYNGSFVTPDRRFRYRTTLTRERNASVYSPSGPVNRRTTTPPDSGVLFEGLGISTRPRDVEIPQFMRQIAVRRPTTADERSLRKIQEQDIINFRRTLYRAGARVRNIEDGGRYRDISAEFFRRNPACLHRLVPWLKRELTVLFGAHGSLVNIVQHIIMSNVTRYDLESQAFVSDLRPFLLNRTEHFIHEFISFARSPFNMAAFDQHANYDCPAPSYEEGSHSDSSVITISPDEAETQELDINVATVSQAPWDDETPGPSYSSSEQVHVTMSSLLNTSDSSDEELVTGGATSQIQGVQTNDDLNNDSDDSSDNCVIVGFVKPLAERTPELVELSSDSEDLGSYEKMETVKTQEQEQSYSSGDSDVSRCSSPHSVLGKDEQINKGHCDSSTRIKSKKEEKRSTSLSSPRNLNSSVRGDRVYSPYNHRHRKRGRSRSSDSRSQSRSGHDQKNHRKHHGKKRMKSKRSRSRESSRPRGRRDKKRSRTRDSSWSRRSQTLSLSSESTSRSRSRSSDHGKRRSRSRNRDRYYLRNNYGSRYKWEYTYYSRNKDRDGYESSYRRRTLSRAHYSRQSSSPEFRVQSFSERTNARKKNNHSERKYYYYERHRSRSLSSNRSRTASTGTDRVRNEKPGGKRKYKTRHLEGTNEVAQPSREFASKAKDSHYQKSSSKLDGNYKNESDTFSDSRSSDRETKHKRRKRKTRSLSVEIVYEGKATDTTKHHKKKKKKHKKKHKKHHGDNASRSPVVITIDSDSDKDSEVKEDTECDNSGPQDPLQNEFLAPSLEPFETKDVVTIEAEFGVLDKECDIATLSNNLNNANKTVDNIPPLAASVEQTLDVREESTFVSDLENQPSNIVSLQTEPSRQLPSPRTSLMSVCLGRDCDMS

SEQ ID NO: 969 - protein, 686 aa, Homo sapiens
MSLRDKGGEEECFEYDCQDEERKPTHRQHDTQDLLEEVLCAERVGQMTKTYNDIDAVTRLLEEKERDLELAARIGQSLLKKNKTLTERNELLEEQVEHIREEVSQLRHELSMKDELLQFYTSAAEESEPESVCSTPLKRNESSSSVQNYFHLDSLQKKLKDLEEENVVLRSEASQLKTETITYEEKEQQLVNDCVKELRDANVQIASISEELAKKTEDAARQQEEITHLLSQIVDLQKKAKACAVENEELVQHLGAAKDAQRQLTAELRELEDKYAECMEMLHEAQEELKNLRNKTMPNTTSRRYHSLGLFPMDSLAAEIEGTMRKELQLEEAESPDITHQKRVFETVRNINQVVKQRSLTPSPMNIPGSNQSSAMNSLLSSCVSTPRSSFYGSDIGNVVLDNKTNSIILETEAADLGNDERSKKPGTPGTPGSHDLETALRRLSLRRENYLSERRFFEEEQERKLQELAEKGELRSGSLTPTESIMSLGTHSRFSEFTGFSGMSFSSRSYLPEKLQIVKPLEGSATLHHWQQLAQPHLGGILDPRPGVVTKGFRTLDVDLDEVYCLNDFEEDDTGDHISLPRLATSTPVQHPETSGERSQARVTVSGSRSYPSRPQASPEEMQEPPAATEEEEEEEEEEGSGEGTTISPVNLAPFPEAEFWAILTSVPGTIRSGSLSVASARLCG

SEQ ID NO: 970 - protein, 234 aa, Homo sapiens
MRKTRLWGLLWMLFVSELRAATKLTEEKYELKEGQTLDVKCDYTLEKFASSQKAWQIIRDGEMPKTLACTERPSKNSHPVQVGRIILEDYHDHGLLRVRMVNLQVEDSGLYQCVIYQPPKEPHMLFDRIRLVVTKGFSGTPGSNENSTQNVYKIPPTTTKALCPLYTSPRTVTQAPPKSTADVSTPDSEINLTNVTDIIRVPVFNIVILLAGGFLSKSLVFSVLFAVTLRSFVP

SEQ ID NO: 971 - protein, 343 aa, Homo sapiens
MNIHRSTPITIARYGRSRNKTQDFEELSSIRSAEPSQSFSPNLGSPSPPETPNLSHCVSCIGKYLLLEPLEGDHVFRAVHLHSGEELVCKVFDISCYQESLAPCFCLSAHSNINQITEIILGETKAYVFFERSYGDMHSFVRTCKKLREEEAARLFYQIASAVAHCHDGGLVLRDLKLRKFIFKDEERTRVKLESLEDAYILRGDDDSLSDKHGCPAYVSPEILNTSGSYSGKAADVWSLGVMLYTMLVGRYPFHDIEPSSLFSKIRRGQFNIPETLSPKAKCLIRSILRREPSERLTSQEILDHPWFSTDFSVSNSAYGAKEVSDQLVPDVNMEENLDPFFN

SEQ ID NO: 972 - protein, 551 aa, Homo sapiens
MAENWKNCFEEELICPICLHVFVEPVQLPCKHNFCRGCIGEAWAKDSGLVRCPECNQAYNQKPGLEKNLKLTNIVEKFNALHVEKPPAALHCVFCRRGPPLPAQKVCLRCEAPCCQSHVQTHLQQPSTARGHLLVEADDVRAWSCPQHNAYRLYHCEAEQVAVCQYCCYYSGAHQGHSVCDVEIRRNEIRKMLMKQQDRLEEREQDIEDQLYKLESDKRLVEEKVNQLKEEVRLQYEKLHQLLDEDLRQTVEVLDKAQAKFCSENAAQALHLGERMQEAKKLLGSLQLLFDKTEDVSFMKNTKSVKILMDRTQTCTSSSLSPTKIGHLNSKLFLNEVAKKEKQLRKMLEGPFSTPVPFLQSVPLYPCGVSSSGAEKRKHSTAFPEASFLETSSGPVGGQYGAAGTASGEGQSGQPLGPCSSTQHLVALPGGAQPVHSSPVFPPSQYPNGSAAQQPMLPQYGGRKILVCSVDNCYCSSVANHGGHQPYPRSGHFPWTVPSQEYSHPLPPTPSVPQSLPSLAVRDWLDASQQPGHQDFYRVYGQPSTKHYVTS

SEQ ID NO: 973 - protein, 652 aa, Homo sapiens
MGGWKGPGQRRGKEGPEARRRAAERGGGGGGGGVPAPRSPAREPRPRSCLLLPPPWGAAMTPDLLNFKKGWMSILDEPGEPPSPSLTTTSTSQWKKHWFVLTDSSLKYYRDSTAEEADELDGEIDLRSCTDVTEYAVQRNYGFQIHTKDAVYTLSAMTSGIRRNWIEALRKTVRPTSAPDVTKLSDSNKENALHSYSTQKGPLKAGEQRAGSEVISRGGPRKADGQRQALDYVELSPLTQASPQRARTPARTPDRLAKQEELERDLAQRSEERRKWFEATDSRTPEVPAGEGPRRGLGAPLTEDQQNRLSEEIEKKWQELEKLPLRENKRVPLTALLNQSRGERRGPPSDGHEALEKEVQALRAQLEAWRLQGEAPQSALRSQEDGHIPPGYISQEACERSLAEMESSHQQVMEELQRHHERELQRLQQEKEWLLAEETAATASAIEAMKKAYQEELSRELSKTRSLQQGPDGLRKQHQSDVEALKRELQVLSEQYSQKCLEIGALMRQAEEREHTLRRCQQEGQELLRHNQELHGRLSEEIDQLRGFIASQGMGNGCGRSNERSSCELEVLLRVKENELQYLKKEVQCLRDELQMMQKDKRFTSGKYQDVYVELSHIKTRSEREIEQLKEHLRLAMAALQEKESMRNSLAE

SEQ ID NO: 974 - protein, 134 aa, Homo sapiens
MNTEMYQTPMEVAVYQLHNFSISFFSSLLGGDVVSVKLDNSASGASVVAIDNKIEQAMDLVKNHLMYAVREEVEILKEQIRELVEKNSQLERENTLLKTLASPEQLEKFQSCLSPEEPAPESPQVPEAPGGSAV

SEQ ID NO: 975 - protein, 1187 aa, Homo sapiens
MPLRHWGMARGSKPVGDGAQPMAAMGGLKVLLHWAGPGGGEPWVTFSESSLTAEEVCIHIAHKVGITPPCFNLFALFDAQAQVWLPPNHILEIPRDASLMLYFRIRFYFRNWHGMNPREPAVYRCGPPGTEASSDQTAQGMQLLDPASFEYLFEQGKHEFVNDVASLWELSTEEEIHHFKNESLGMAFLHLCHLALRHGIPLEEVAKKTSFKDCIPRSFRRHIRQHSALTRLRLRNVFRRFLRDFQPGRLSQQMVMVKYLATLERLAPRFGTERVPVCHLRLLAQAEGEPCYIRDSGVAPTDPGPESAAGPPTHEVLVTGTGGIQWWPVEEEVNKEEGSSGSSGRNPQASLFGKKAKAHKAVGQPADRPREPLWAYFCDFRDITHVVLKEHCVSIHRQDNKCLELSLPSRAAALSFVSLVDGYFRLTADSSHYLCHEVAPPRLVMSIRDGIHGPLLEPFVQAKLRPEDGLYLIHWSTSHPYRLILTVAQRSQAPDGMQSLRLRKFPIEQQDGAFVLEGWGRSFPSVRELGAALQGCLLRAGDDCFSLRRCCLPQPGETSNLIIMRGARASPRTLNLSQLSFHRVDQKEITQLSHLGQGTRTNVYEGRLRVEGSGDPEEGKMDDEDPLVPGRDRGQELRVVLKVLDPSHHDIALAFYETASLMSQVSHTHLAFVHGVCVRGPENIMVTEYVEHGPLDVWLRRERGHVPMAWKMVVAQQLASALSYLENKNLVHGNVCGRNILLARLGLAEGTSPFIKLSDPGVGLGALSREERVERIPWLAPECLPGGANSLSTAMDKWGFGATLLEICFDGEAPLQSRSPSEKEHFYQRQHRLPEPSCPQLATLTSQCLTYEPTQRPSFRTILRDLTRLQPHNLADVLTVNPDSPASDPTVFHKRYLKKIRDLGEGHFGKVSLYCYDPTNDGTGEMVAVKALKADCGPQHRSGWKQEIDILRTLYHEHIIKYKGCCEDQGEKSLQLVMEYVPLGSLRDYLPRHSIGLAQLLLFAQQICEGMAYLHAQHYIHRDLAARNVLLDNDRLVKIGDFGLAKAVPEGHEYYRVREDGDSPVFWYAPECLKEYKFYYASDVWSFGVTLYELLTHCDSSQSPPTKFLELIGIAQGQMTVLRLTELLERGERLPRPDKCPCEVYHLMKNCWETEASFRPTFENLIPILKTVHEKYQGQAPSVFSVC

SEQ ID NO: 976 - protein, 113 aa, Homo sapiens
MGGLEPCSRLLLLPLLLAVSGLRPVQAQAQSDCSCSTVSPGVLAGIVMGDLVLTVLIALAVYFLGRLVPRGRGAAEAATRKQRITETESPYQELQGQRSDVYSDLNTQRPYYK

SEQ ID NO: 977 - protein, 147 aa, Homo sapiens
MALKRIHKELNDLARDPPAQCSAGPVGDDMFHWQATIMGPNDSPYQGGVFFLTIHFPTDYPFKPPKVAFTTRIYHPNINSNGSICLDILRSQWSPALTISKVLLSICSLLCDPNPDDPLVPEIARIYKTDREKYNRIAREWTQKYAM

SEQ ID NO: 978 - protein, 153 aa, Homo sapiens
MMASMRVVKELEDLQKKPPPYLRNLSSDDANVLVWHALLLPDQPPYHLKAFNLRISFPPEYPFKPPMIKFTTKIYHPNVDENGQICLPIISSENWKPCTKTCQVLEALNVLVNRPNIREPLRMDLADLLTQNPELFRKNAEEFTLRFGVDRPS

SEQ ID NO: 979 - protein, 1134 aa, Homo sapiens
MSEPHRVQFTSLPGSLNPAFLKKSRKEEAGAGEQHQDCEPAAAAVRITLTLFEPDHKRCPEFFYPELVKNIRGKVKGLQPGDKKKDLSDPFNDEEKERHKVEALARKFEEKYGGKKRRKDRIQDLIDMGYGYDESDSFIDNSEAYDELVPASLTTKYGGFYINSGTLQFRQASESEDDFIKEKKKKSPKKRKLKEGGEKIKKKKKDDTYDKEKKSKKSKFSKAGFTALNASKEKKKKKYSGALSVKEMLKKFQKEKEAQKKREEEHKPVAVPSAEAQGLRELEGASDPLLSLFGSTSDNDLLQAATAMDSLTDLDLEHLLSESPEGSPFRDMDDGSDSLGVGLDQEFRQPSSLPEGLPAPLEKRVKELAQAARAAEGESRQKFFTQDINGILLDIEAQTRELSSQVRSGVYAYLASFLPCSKDALLKRARKLHLYEQGGRLKEPLQKLKEAIGRAMPEQMAKYQDECQAHTQAKVAKMLEEEKDKEQRDRICSDEEEDEEKGGRRIMGPRKKFQWNDEIRELLCQVVKIKLESQDLERNNKAQAWEDCVKGFLDAEVKPLWPKGWMQARTLFKESRRGHGHLTSILAKKKVMAPSKIKVKESSTKPDKKVSVPSGQIGGPIALPSDHQTGGLSIGASSRELPSQASGGLANPPPVNLEDSLDEDLIRNPASSVEAVSKELAALNSRAAGNSEFTLPAPSKAPAEKVGGVLCTEEKRNFAKPSPSAPPPASSLQSPLNFLAEQALALGQSSQEKKPESSGYKELSCQAPLNKGLPEVHQSKAKHHSLPRTSHGPQVAVPVPGPQVKVFHAGTQQQKNFTPPSPFANKLQGPKASPTQCHRSLLQLVKTAAKGQGFHPSAPATSGGLSASSSSSHKTPASSSSALSHPAKPHSVSSAGSSYKNNPFASSISKHGVSSGSSSSGGTPVQSSVSGSLVPGIQPPSVGQATSRPVPSSAGKKMPVSQKLTLVAPPGGPNGDSSGGTQGVAKLLTSPSLKPSAVSSVTSSTSLSKGASGTVLLAGSSLMASPYKSSSPKLSGAMSSNSLGIITPVPIPVHVLSFSADSSAKAGVSKDAIVTGPAPGSFHHGLGHSLLAGLHSSPPHAAPLPHAAVPTHIPQSLPGASQLHGKGPAVPRKL

SEQ ID NO: 980 - protein, 624 aa, Homo sapiens
MAENGESSGPPRPSRGPAAAQGSAAAPAEPKIIKVTVKTPKEKEEFAVPENSSVQQFKEAISKRFKSQTDQLVLIFAGKILKDQDTLIQHGIHDGLTVHLVIKSQNRPQGQSTQPSNAAGTNTTSASTPRSNSTPISTNSNPFGLGSLGGLAGLSSLGLSSTNFSELQSQMQQQLMASPEMMIQIMENPFVQSMLSNPDLMRQLIMANPQMQQLIQRNPEISHLLNNPDIMRQTLEIARNPAMMQEMMRNQDLALSNLESIPGGYNALRRMYTDIQEPMLNAAQEQFGGNPFASVGSSSSSGEGTQPSRTENRDPLPNPWAPPPATQSSATTSTTTSTGSGSGNSSSNATGNTVAAANYVASIFSTPGMQSLLQQITENPQLIQNMLSAPYMRSMMQSLSQNPDLAAQMMLNSPLFTANPQLQEQMRPQLPAFLQQMQNPDTLSAMSNPRAMQALMQIQQGLQTLATEAPGLIPSFTPGVGVGVLGTAIGPVGPVTPIGPIGPIVPFTPIGPIGPIGPTGPAAPPGSTGSGGPTGPTVSSAAPSETTSPTSESGPNQQFIQQMVQALAGANAPQLPNPEVRFQQQLEQLNAMGFLNREANLQALIATGGDINAAIERLLGSQPS

SEQ ID NO: 981 - protein, 331 aa, Homo sapiens
MAEGGGPEPGEQERRSSGPRPPSARDLQLALAELYEDEVKCKSSKSNRPKATVFKSPRTPPQRFYSSEHEYSGLNIVRPSTGKIVNELFKEAREHGAVPLNEATRASGDDKSKSFTGGGYRLGSSFCKRSEYIYGENQLQDVQILLKLWSNGFSLDDGELRPYNEPTNAQFLESVKRGEIPLELQRLVHGGQVNLDMEDHQDQEYIKPRLRFKAFSGEGQKLGSLTPEIVSTPSSPEEEDKSILNAVVLIDDSVPTTKIQIRLADGSRLIQRFNSTHRILDVRNFIVQSRPEFAALDFILVTSFPNKELTDESLTLLEADILNTVLLQQLK

SEQ ID NO: 982 - protein, 798 aa, Homo sapiens
MALHSPQYIFGDFSPDEFNQFFVTPRSSVELPPYSGTVLCGTQAVDKLPDGQEYQRIEFGVDEVIEPSDTLPRTPSYSISSTLNPQAPEFILGCTASKITPDGITKEASYGSIDCQYPGSALALDGSSNVEAEVLENDGVSGGLGQRERKKKKKRPPGYYSYLKDGGDDSISTEALVNGHANSAVPNSVSAEDAEFMGDMPPSVTPRTCNSPQNSTDSVSDIVPDSPFPGALGSDTRTAGQPEGGPGADFGQSCFPAEAGRDTLSRTAGAQPCVGTDTTENLGVANGQILESSGEGTATNGVELHTTESIDLDPTKPESASPPADGTGSASGTLPVSQPKSWASLFHDSKPSSSSPVAYVETKYSPPAISPLVSEKQVEVKEGLVPVSEDPVAIKIAELLENVTLIHKPVSLQPRGLINKGNWCYINATLQALVACPPMYHLMKFIPLYSKVQRPCTSTPMIDSFVRLMNEFTNMPVPPKPRQALGDKIVRDIRPGAAFEPTYIYRLLTVNKSSLSEKGRQEDAEEYLGFILNGLHEEMLNLKKLLSPSNEKLTISNGPKNHSVNEEEQEEQGEGSEDEWEQVGPRNKTSVTRQADFVQTPITGIFGGHIRSVVYQQSSKESATLQPFFTLQLDIQSDKIRTVQDALESLVARESVQGYTTKTKQEVEISRRVTLEKLPPVLVLHLKRFVYEKTGGCQKLIKNIEYPVDLEISKELLSPGVKNKNFKCHRTYRLFAVVYHHGNSATGGHYTTDVFQIGLNGWLRIDDQTVKVINQYQVVKPTAERTAYLLYYRRVDLL

SEQ ID NO: 983 - protein, 952 aa, Homo sapiens
MAEGGAADLDTQRSDIATLLKTSLRKGDTWYLVDSRWFKQWKKYVGFDSWDKYQMGDQNVYPGPIDNSGLLKDGDAQSLKEHLIDELDYILLPTEGWNKLVSWYTLMEGQEPIARKVVEQGMFVKHCKVEVYLTELKLCENGNMNNVVTRRFSKADTIDTIEKEIRKIFSIPDEKETRLWNKYMSNTFEPLNKPDSTIQDAGLYQGQVLVIEQKNEDGTWPRGPSTPNVKNSNYCLPSYTAYKNYDYSEPGRNNEQPGLCGLSNLGNTCFMNSAIQCLSNTPPLTEYFLNDKYQEELNFDNPLGMRGEIAKSYAELIKQMWSGKFSYVTPRAFKTQVGRFAPQFSGYQQQDCQELLAFLLDGLHEDLNRIRKKPYIQLKDADGRPDKVVAEEAWENHLKRNDSIIVDIFHGLFKSTLVCPECAKISVTFDPFCYLTLPLPMKKERTLEVYLVRMDPLTKPMQYKVVVPKIGNILDLCTALSALSGIPADKMIVTDIYNHRFHRIFAMDENLSSIMERDDIYVFEININRTEDTEHVIIPVCLREKFRHSSYTHHTGSSLFGQPFLMAVPRNNTEDKLYNLLLLRMCRYVKISTETEETEGSLHCCKDQNINGNGPNGIHEEGSPSEMETDEPDDESSQDQELPSENENSQSEDSVGGDNDSENGLCTEDTCKGQLTGHKKRLFTFQFNNLGNTDINYIKDDTRHIRFDDRQLRLDERSFLALDWDPDLKKRYFDENAAEDFEKHESVEYKPPKKPFVKLKDCIELFTTKEKLGAEDPWYCPNCKEHQQATKKLDLWSLPPVLVVHLKRFSYSRYMRDKLDTLVDFPINDLDMSEFLINPNAGPCRYNLIAVSNHYGGMGGGHYTAFAKNKDDGKWYYFDDSSVSTASEDQIVSKAAYVLFYQRQDTFSGTGFFPLDRETKGASAATGIPLESDEDSNDNDNDIENENCMHTN

SEQ ID NO: 984 - protein, 372 aa, Homo sapiens
MSKAFGLLRQICQSILAESSQSPADLEEKKEEDSNMKREQPRERPRAWDYPHGLVGLHNIGQTCCLNSLIQVFVMNVDFTRILKRITVPRGADEQRRSVPFQMLLLLEKMQDSRQKAVRPLELAYCLQKCNVPLFVQHDAAQLYLKLWNLIKDQITDVHLVERLQALYTIRVKDSLICVDCAMESSRNSSMLTLPLSLFDVDSKPLKTLEDALHCFFQPRELSSKSKCFCENCGKKTRGKQVLKLTHLPQTLTIHLMRFSIRNSQTRKICHSLYFPQSLDFSQILPMKRESCDAEEQSGGQYELFAVIAHVGMADSGHYCVYIRNAVDGKWFCFNDSNICLVSWEDIQCTYGNPNYHWQETAYLLVYMKMEC

SEQ ID NO: 985 - protein, 963 aa, Homo sapiens
MAEGGGCRERPDAETQKSELGPLMRTTLQRGAQWYLIDSRWFKQWKKYVGFDSWDMYNVGEHNLFPGPIDNSGLFSDPESQTLKEHLIDELDYVLVPTEAWNKLLNWYGCVEGQQPIVRKVVEHGLFVKHCKVEVYLLELKLCENSDPTNVLSCHFSKADTIATIEKEMRKLFNIPAERETRLWNKYMSNTYEQLSKLDNTVQDAGLYQGQVLVIEPQNEDGTWPRQTLQSKSSTAPSRNFTTSPKSSASPYSSVSASLIANGDSTSTCGMHSSGVSRGGSGFSASYNCQEPPSSHIQPGLCGLGNLGNTCFMNSALQCLSNTAPLTDYFLKDEYEAEINRDNPLGMKGEIAEAYAELIKQMWSGRDAHVAPRMFKTQVGRFAPQFSGYQQQDSQELLAFLLDGLHEDLNRVKKKPYLELKDANGRPDAVVAKEAWENHRLRNDSVIVDTFHGLFKSTLVCPECAKVSVTFDPFCYLTLPLPLKKDRVMEVFLVPADPHCRPTQYRVTVPLMGAVSDLCEALSRLSGIAAENMVVADVYNHRFHKIFQMDEGLNHIMPRDDIFVYEVCSTSVDGSECVTLPVYFRERKSRPSSTSSASALYGQPLLLSVPKHKLTLESLYQAVCDRISRYVKQPLPDEFGSSPLEPGACNGSRNSCEGEDEEEMEHQEEGKEQLSETEGSGEDEPGNDPSETTQKKIKGQPCPKRLFTFSLVNSYGTADINSLAADGKLLKLNSRSTLAMDWDSETRRLYYDEQESEAYEKHVSMLQPQKKKKTTVALRDCIELFTTMETLGEHDPWYCPNCKKHQQATKKFDLWSLPKILVVHLKRFSYNRYWRDKLDTVVEFPIRGLNMSEFVCNLSARPYVYDLIAVSNHYGAMGVGHYTAYAKNKLNGKWYYFDDSNVSLASEDQIVTKAAYVLFYQRRDDEFYKTPSLSSSGSSDGGTRPSSSQQGFGDDEACSMDTN

SEQ ID NO: 986 - protein, 771 aa, Homo sapiens
MTANRLAESLLALSQQEELADLPKDYLLSESEDEGDNDGERKHQKLLEAISSLDGKNRRKLAERSEASLKVSEFNVSSEGSGEKLVLADLLEPVKTSSSLATVKKQLSRVKSKKTVELPLNKEEIERIHREVAFNKTAQVLSKWDPVVLKNRQAEQLVFPLEKEEPAIAPIEHVLSGWKARTPLEQEIFNLLHKNKQPVTDPLLTPVEKASLRAMSLEEAKMRRAELQRARALQSYYEAKARREKKIKSKKYHKVVKKGKAKKALKEFEQLRKVNPAAALEELEKIEKARMMERMSLKHQNSGKWAKSKAIMAKYDLEARQAMQEQLSKNKELTQKLQVASESEEEEGGTEDVEELLVPDVVNEVQMNADGPNPWMLRSCTSDTKEAATQEDPEQLPELEAHGVSESEGEERPVAEEEILLREFEERRSLRKRSELSQDAEPAGSQETKDSGSQEVLSELRVLSQKLKENHQSRKQKASSEGTIPQVQREEPAPEEEEPLLLQRPERVQTLEELEELGKEECFQNKELPRPVLEGQQSERTPNNRPDAPKEKKKKEQMIDLQNLLTTQSPSVKSLAVPTIEELEDEEERNHRQMIKEAFAGDDVIRDFLKEKREAVEASKPKDVDLTLPGWGEWGGVGLKPSAKKRRRFLIKAPEGPPRKDKNLPNVIINEKRNIHAAAHQVRVLPYPFTHHWQFERTIQTPIGSTWNTQRAFQKLTTPKVVTKPGHIINPIKAEDVGYRSSSRSDLSVIQRNPKRITTRHKKQLKKCSVD

SEQ ID NO: 987 - protein, 100 aa, Homo sapiens
MSTGPTAATGSNRRLQQTQNQVDEVVDIMRVNVDKVLERDQKLSELDDRADALQAGASQFETSAAKLKRKYWWKNCKMWAIGITVLVIFIIIIIVWVVSS

SEQ ID NO: 988 - protein, 847 aa, Homo sapiens
MEPWKQCAQWLIHCKVLPTNHRVTWDSAQVFDLAQTLRDGVLLCQLLNNLRAHSINLKEINLRPQMSQFLCLKNIRTFLTACCETFGMRKSELFEAFDLFDVRDFGKVIETLSRLSRTPIALATGIRPFPTEESINDEDIYKGLPDLIDETLVEDEEDLYDCVYGEDEGGEVYEDLMKAEEAHQPKCPENDIRSCCLAEIKQTEEKYTETLESIEKYFMAPLKRFLTAAEFDSVFINIPELVKLHRNLMQEIHDSIVNKNDQNLYQVFINYKERLVIYGQYCSGVESAISSLDYISKTKEDVKLKLEECSKRANNGKFTLRDLLVVPMQRVLKYHLLLQELVKHTTDPTEKANLKLALDAMKDLAQYVNEVKRDNETLREIKQFQLSIENLNQPVLLFGRPQGDGEIRITTLDKHTKQERHIFLFDLAVIVCKRKGDNYEMKEIIDLQQYKIANNPTTDKENKKWSYGFYLIHTQGQNGLEFYCKTKDLKKKWLEQFEMALSNIRPDYADSNFHDFKMHTFTRVTSCKVCQMLLRGTFYQGYLCFKCGARAHKECLGRVDNCGRVNSGEQGTLKLPEKRTNGLRRTPKQVDPGLPKMQVIRNYSGTPPPALHEGPPLQLQAGDTVELLKGDAHSLFWQGRNLASGEVGFFPSDAVKPCPCVPKPVDYSCQPWYAGAMERLQAETELINRVNSTYLVRHRTKESGEYAISIKYNNEAKHIKILTRDGFFHIAENRKFKSLMELVEYYKHHSLKEGFRTLDTTLQFPYKEPEHSAGQRGNRAGNSLLSPKVLGIAIARYDFCARDMRELSLLKGDVVKIYTKMSANGWWRGEVNGRVGWFPSTYVEEDE

SEQ ID NO: 989 - protein, 521 aa, Homo sapiens
MEANWTAFLFQAHEASHHQQQAAQNSLLPLLSSAVEPPDQKPLLPIPITQKPQGAPETLKDAIGIKKEKPKTSFVCTYCSKAFRDSYHLRRHESCHTGIKLVSRPKKTPTTVVPLISTIAGDSSRTSLVSTIAGILSTVTTSSSGTNPSSSASTTAMPVTQSVKKPSKPVKKNHACEMCGKAFRDVYHLNRHKLSHSDEKPFECPICNQRFKRKDRMTYHVRSHEGGITKPYTCSVCGKGFSRPDHLSCHVKHVHSTERPFKCQTCTAAFATKDRLRTHMVRHEGKVSCNICGKLLSAAYITSHLKTHGQSQSINCNTCKQGISKTCMSEETSNQKQQQQQQQQQQQQQQQQQQHVTSWPGKQVETLRLWEEAVKARKKEAANLCQTSTAATTPVTLTTPFSITSSVSSGTMSNPVTVAAAMSMRSPVNVSSAVNITSPMNIGHPVTITSPLSMTSPLTLTTPVNLPTPVTAPVNIAHPVTITSPMNLPTPMTLAAPLNIAMRPVESMPFLPQALPTSPPW

SEQ ID NO: 990 - protein, 1426 aa, Homo sapiens
MENEPDHENVEQSLCAKTSEEELNKSFNLEASLSKFSYIDMDKELEFKNDLIDDKEFDIPQVDTPPTLESILNETDDEDESFILEDPTLLNIDTIDSHSYDTSSVASSDSGDRTNLKRKKKLPDSFSLHGSVMRHSLLKGISAQIVSAADKVDAGLPTAIAVSSLIAVGTSHGLALIFDQNQALRLCLGSTSVGGQYGAISALSINNDCSRLLCGFAKGQITMWDLASGKLLRSITDAHPPGTAILHIKFTDDPTLAICNDSGGSVFELTFKRVMGVRTCESRCLFSGSKGEVCCIEPLHSKPELKDHPITQFSLLAMASLTKILVIGLKPSLKVWMTFPYGRMDPSSVPLLAWHFVAVQNYVNPMLAFCRGDVVHFLLVKRDESGAIHVTKQKHLHLYYDLINFTWINSRTVVLLDSVEKLHVIDRQTQEELETVEISEVQLVYNSSHFKSLATGGNVSQALALVGEKACYQSISSYGGQIFYLGTKSVYVMMLRSWRERVDHLLKQDCLTEALALAWSFHEGKAKAVVGLSGDASKRKAIVADRMVEILFHYADRALKKCPDQGKIQVMEQHFQDMVPVIVDYCLLLQRKDLLFSQMYDKLSENSVAKGVFLECLEPYILSDKLVGITPQVMKDLIVHFQDKKLMENVEALIVHMDITSLDIQQVVLMCWENRLYDAMIYVYNRGMNEFISPMEKLFRVIAPPLNAGKTLTDEQVVMGNKLLVYISCCLAGRAYPLGDIPEDLVPLVKNQVFEFLIRLHSAEASPEEEIYPYIRTLLHFDTREFLNVLALTFEDFKNDKQAVEYQQRIVDILLKVMVENSDFTPSQVGCLFTFLARQLAKPDNTLFVNRTLFDQVLEFLCSPDDDSRHSERQQVLLELLQAGGIVQFEESRLIRMAEKAEFYQICEFMYEREHQYDKIIDCYLRDPLREEEVFNYIHNILSIPGHSAEEKQSVWQKAMDHIEELVSLKPCKAAELVATHFSGHIETVIKKLQNQVLLFKFLRSLLDPREGIHVNQELLQISPCITEQFIELLCQFNPTQVIETLQVLECYRLEETIQITQKYQLHEVTAYLLEKKGDIHGAFLIMLERLQSKLQEVTHQGENTKEDPSLKDVEDTMVETIALCQRNSHNLNQQQREALWFPLLEAMMAPQKLSSSAIPHLHSEALKSLTMQVLNSMAAFIALPSILQRILQDPVYGKGKLGEIQGLILGMLDTFNYEQTLLETTTSLLNQDLHWSLCNLRASVTRGLNPKQDYCSICLQQYKRRQEMADEIIVFSCGHLYHSFCLQNKECTVEFEGQTRWTCYKCSSSNKVGKLSENSSEIKKGRITPSQVKMSPSYHQSKGDPTAKKGTSEPVLDPQQIQAFDQLCRLYRGSSRLALLTELSQNRSSESYRPFSGSQSAPAFNSIFQNENFQLQLIPPPVTED

SEQ ID NO: 991 - protein, 498 aa, Homo sapiens
MPLVTRNIEPRHLCRQTLPSVRSELECVTNITLANVIRQLGSLSKYAEDIFGELFTQANTFASRVSSLAERVDRLQVKVTQLDPKEEEVSLQGINTRKAFRSSTIQDQKLFDRNSLPVPVLETYNTCDTPPPLNNLTPYRDDGKEALKFYTDPSYFFDLWKEKMLQDTKDIMKEKRKHRKEKKDNPNRGNVNPRKIKTRKEEWEKMKMGQEFVESKEKLGTSGYPPTLVYQNGSIGCVENVDASSYPPPPQSDSASSPSPSFSEDNLPPPPAEFSYPVDNQRGSGLAGPKRSSVVSPSHPPPAPPLGSPPGPKPGFAPPPAPPPPPPPMIGIPPPPPPVGFGSPGTPPPPSPPSFPPHPDFAAPPPPPPPPAADYPTLPPPPLSQPTGGAPPPPPPPPPPGPPPPPFTGADGQPAIPPPLSDTTKPKSSLPAVSDARSDLLSAIRQGFQLRRVEEQREQEKRDVVGNDVATILSRRIAVEYSDSEDDSSEFDEDDWSD

SEQ ID NO: 992 - protein, 261 aa, Homo sapiens
MALNKNHSEGGGVIVNNTESILMSYDHVELTFNDMKNVPEAFKGTKKGTVYLTPYRVIFLSKGKDAMQSFMMPFYLMKDCEIKQPVFGANYIKGTVKAEAGGGWEGSASYKLTFTAGGAIEFGQRMLQVASQASRGEVPSGAYGYSYMPSGAYVYPPPVANGMYPCPPGYPYPPPPPEFYPGPPMMDGAMGYVQPPPPPYPGPMEPPVSGPDVPSTPAAEAKAAEAAASAYYNPGNPHNVYMPTSQPPPPPYYPPEDKKTQ

SEQ ID NO: 993 - protein, 494 aa, Homo sapiens
MPTESASCSTARQTKQKRKSHSLSIRRTNSSEQERTGLPRDMLEGQDSKLPSSVRSTLLELFGQIEREFENLYIENLELRREIDTLNERLAAEGQAIDGAELSKGQLKTKASHSTSQLSQKLKTTYKASTSKIVSSFKTTTSRAACQLVKEYIGHRDGIWDVSVAKTQPVVLGTASADHTALLWSIETGKCLVKYAGHVGSVNSIKFHPSEQLALTASGDQTAHIWRYAVQLPTPQPVADTSISGEDEVECSDKDEPDLDGDVSSDCPTIRVPLTSLKSHQGVVIASDWLVGGKQAVTASWDRTANLYDVETSELVHSLTGHDQELTHCCTHPTQRLVVTSSRDTTFRLWDFRDPSIHSVNVFQGHTDTVTSAVFTVGDNVVSGSDDRTVKVWDLKNMRSPIATIRTDSAINRINVCVGQKIIALPHDNRQVRLFDMSGVRLARLPRSSRQGHRRMVCCSAWSEDHPVCNLFTCGFDRQAIGWNINIPALLQEK

SEQ ID NO: 994 - protein, 920 aa, Homo sapiens
MTAEETVNVKEVEIIKLILDFLNSKKLHISMLALEKESGVINGLFSDDMLFLRQLILDGQWDEVLQFIQPLECMEKFDKKRFRYIILKQKFLEALCVNNAMSAEDEPQHLEFTMQEAVQCLHALEEYCPSKDDYSKLCLLLTLPRLTNHAEFKDWNPSTARVHCFEEACVMVAEFIPADRKLSEAGFKASNNRLFQLVMKGLLYECCVEFCQSKATGEEITESEVLLGIDLLCGNGCDDLDLSLLSWLQNLPSSVFSCAFEQKMLNIHVDKLLKPTKAAYADLLTPLISKLSPYPSSPMRRPQSADAYMTRSLNPALDGLTCGLTSHDKRISDLGNKTSPMSHSFANFHYPGVQNLSRSLMLENTECHSIYEESPERSDTPVDAQRPIGSEILGQSSVSEKEPANGAQNPGPAKQEKNELRDSTEQFQEYYRQRLRYQQHLEQKEQQRQIYQQMLLEGGVNQEDGPDQQQNLTEQFLNRSIQKLGELNIGMDGLGNEVSALNQQCNGSKGNGSNGSSVTSFTTPPQDSSQRLTHDASNIHTSTPRNPGSTNHIPFLEESPCGSQISSEHSVIKPPLGDSPGSLSRSKGEEDDKSKKQFVCINILEDTQAVRAVAFHPAGGLYAVGSNSKTLRVCAYPDVIDPSAHETPKQPVVRFKRNKHHKGSIYCVAWSPCGQLLATGSNDKYVKVLPFNAETCNATGPDLEFSMHDGTIRDLAFMEGPESGGAILISAGAGDCNIYTTDCQRGQGLHALSGHTGHILALYTWSGWMIASGSQDKTVRFWDLRVPSCVRVVGTTFHGTGSAVASVAVDPSGRLLATGQEDSSCMLYDIRGGRMVQSYHPHSSDVRSVRFSPGAHYLLTGSYDMKIKVTDLQGDLTKQLPIMVVGEHKDKVIQCRWHTQDLSFLSSSADRTVTLWTYNG

SEQ ID NO: 995 - protein, 301 aa, Homo sapiens
MEGDFSVCRNCKRHVVSANFTLHEAYCLRFLVLCPECEEPVPKETMEEHCKLEHQQVGCTMCQQSMQKSSLEFHKANECQERPVECKFCKLDMQLSKLELHESYCGSRTELCQGCGQFIMHRMLAQHRDVCRSEQAQLGKGERISAPEREIYCHYCNQMIPENKYFHHMGKCCPDSEFKKHFPVGNPEILPSSLPSQAAENQTSTMEKDVRPKTRSINRFPLHSESSSKKAPRSKNKTLDPLLMSEPKPRTSSPRGDKAAYDILRRCSQCGILLPLPILNQHQEKCRWLASSKGKQVRNFS

SEQ ID NO: 996 - protein, 940 aa, Homo sapiens
MARKRAAGGEPRGRELRSQKSKAKSKARREEEEEDAFEDEKPPKKSLLSKVSQGKRKRGCSHPGGSADGPAKKKVAKVTVKSENLKVIKDEALSDGDDLRDFPSDLKKAHHLKRGATMNEDSNEEEEESENDWEEVEELSEPVLGDVRESTAFSRSLLPVKPVEIEIETPEQAKTRERSEKIKLEFETYLRRAMKRFNKGVHEDTHKVHLLCLLANGFYRNNICSQPDLHAIGLSIIPARFTRVLPRDVDTYYLSNLVKWFIGTFTVNAELSASEQDNLQTTLERRFAIYSARDDEELVHIFLLILRALQLLTRLVLSLQPIPLKSATAKGKKPSKERLTADPGGSSETSSQVLENHTKPKTSKGTKQEETFAKGTCRPSAKGKRNKGGRKKRSKPSSSEEDEGPGDKQEKATQRRPHGRERRVASRVSYKEESGSDEAGSGSDFELSSGEASDPSDEDSEPGPPKQRKAPAPQRTKAGSKSASRTHRGSHRKDPSLPAASSSSSSSKRGKKMCSDGEKAEKRSIAGIDQWLEVFCEQEEKWVCVDCVHGVVGQPLTCYKYATKPMTYVVGIDSDGWVRDVTQRYDPVWMTVTRKCRVDAEWWAETLRPYQSPFMDREKKEDLEFQAKHMDQPLPTAIGLYKNHPLYALKRHLLKYEAIYPETAAILGYCRGEAVYSRDCVHTLHSRDTWLKKARVVRLGEVPYKMVKGFSNRARKARLAEPQLREENDLGLFGYWQTEEYQPPVAVDGKVPRNEFGNVYLFLPSMMPIGCVQLNLPNLHRVARKLDIDCVQAITGFDFHGGYSHPVTDGYIVCEEFKDVLLTAWENEQAVIERKEKEKKEKRALGNWKLLAKGLLIRERLKRRYGPKSEAAAPHTDAGGGLSSDEEEGTSSQAEAARILAASWPQNREDEEKQKLKGGPKKTKREKKAAASHLFPFEQL

SEQ ID NO: 997 - protein, 1125 aa, Homo sapiens
MASEEASLRALESLMTEFFHDCTTNERKREIEELLNNFAQQIGAWRFCLYFLSSTRNDYVMMYSLTVFENLINKMWLGVPSQDKMEIRSCLPKLLLAHHKTLPYFIRNKLCKVIVDIGRQDWPMFYHDFFTNILQLIQSPVTTPLGLIMLKTTSEELACPREDLSVARKEELRKLLLDQVQTVLGLLTGILETVWDKHSVTAATPPPSPTSGESGDLLSNLLQSPSSAKLLNQPIPILDVESEYICSLALECLAHLFSWIPLSASITPSLLTTIFHFARFGCDIRARKMASVNGSSQNCVSGQERGRLGVLAMSCINELMSKNCVPMEFEEYLLRMFQQTFYLLQKITKDNNAHTVKSRLEELDESYIEKFTDFLRLFVSVHLRRIESYSQFPVVEFLTLLFKYTFHQPTHEGYFSCLDIWTLFLDYLTSKIKSRLGDKEAVLNRYEDALVLLLTEVLNRIQFRYNQAQLEELDDETLDDDQQTEWQRYLRQSLEVVAKVMELLPTHAFSTLFPVLQDNLEVYLGLQQFIVTSGSGHRLNITAENDCRRLHCSLRDLSSLLQAVGRLAEYFIGDVFAARFNDALTVVERLVKVTLYGSQIKLYNIETAVPSVLKPDLIDVHAQSLAALQAYSHWLAQYCSEVHRQNTQQFVTLISTTMDAITPLISTKVQDKLLLSACHLLVSLATTVRPVFLISIPAVQKVFNRITDASALRLVDKAQVLVCRALSNILLLPWPNLPENEQQWPVRSINHASLISALSRDYRNLKPSAVAPQRKMPLDDTKLIIHQTLSVLEDIVENISGESTKSRQICYQSLQESVQVSLALFPAFIHQSDVTDEMLSFFLTLFRGLRVQMGVPFTEQIIQTFLNMFTREQLAESILHEGSTGCRVVEKFLKILQVVVQEPGQVFKPFLPSIIALCMEQVYPIIAERPSPDVKAELFELLFRTLHHNWRYFFKSTVLASVQRGIAEEQMENEPQFSAIMQAFGQSFLQPDIHLFKQNLFYLETLNTKQKLYHKKIFRTAMLFQFVNVLLQVLVHKSHDLLQEEIGIAIYNMASVDFDGFFAAFLPEFLTSCDGVDANQKSVLGRNFKMDRDLPSFTQNVHRLVNDLRYYRLCNDSLPPGTVKL

SEQ ID NO: 998 - protein, 121 aa, Homo sapiens
MGRIFLDHIGGTRLFSCANCDTILTNRSELISTRFTGATGRAFLFNKVVNLQYSEVQDRVMLTGRHMVRDVSCKNCNSKLGWIYEFATEDSQRYKEGRVILERALVRESEGFEEHVPSDNS

SEQ ID NO: 999 - protein, 585 aa, Homo sapiens
MSATSVDQRPKGQGNKVSVQNGSIHQKDAVNDDDFEPYLSSQTNQSNSYPPMSDPYMPSYYAPSIGFPYSLGEAAWSTAGDQPMPYLTTYGQMSNGEHHYIPDGVFSQPGALGNTPPFLGQHGFNFFPGNADFSTWGTSGSQGQSTQSSAYSSSYGYPPSSLGRAITDGQAGFGNDTLSKVPGISSIEQGMTGLKIGGDLTAAVTKTVGTALSSSGMTSIATNSVPPVSSAAPKPTSWAAIARKPAKPQPKLKPKGNVGIGGSAVPPPPIKHNMNIGTWDEKGSVVKAPPTQPVLPPQTIIQQPQPLIQPPPLVQSQLPQQQPQPPQPQQQQGPQPQAQPHQVQPQQQQLQNRWVAPRNRGAGFNQNNGAGSENFGLGVVPVSASPSSVEVHPVLEKLKAINNYNPKDFDWNLKNGRVFIIKSYSEDDIHRSIKYSIWCSTEHGNKRLDAAYRSLNGKGPLYLLFSVNGSGHFCGVAEMKSVVDYNAYAGVWSQDKWKGKFEVKWIFVKDVPNNQLRHIRLENNDNKPVTNSRDTQEVPLEKAKQVLKIIATFKHTTSIFDDFAHYEKRQEEEEAMRRERNRNKQ

SEQ ID NO: 1000 - protein, 522 aa, Homo sapiens
MEFPDHSRHLLQCLSEQRHQGFLCDCTVLVGDAQFRAHRAVLASCSMYFHLFYKDQLDKRDIVHLNSDIVTAPAFALLLEFMYEGKLQFKDLPIEDVLAAASYLHMYDIVKVCKKKLKEKATTEADSTKKEEDASSCSDKVESLSDGSSHIAGDLPSDEDEGEDEKLNILPSKRDLAAEPGNMWMRLPSDSAGIPQAGGEAEPHATAAGKTVASPCSSTESLSQRSVTSVRDSADVDCVLDLSVKSSLSGVENLNSSYFSSQDVLRSNLVQVKVEKEASCDESDVGTNDYDMEHSTVKESVSTNNRVQYEPAHLAPLREDSVLRELDREDKASDDEMMTPESERVQVEGGMESSLLPYVSNILSPAGQIFMCPLCNKVFPSPHILQIHLSTHFREQDGIRSKPAADVNVPTCSLCGKTFSCMYTLKRHERTHSGEKPYTCTQCGKSFQYSHNLSRHAVVHTREKPHACKWCERRFTQSGDLYRHIRKFHCELVNSLSVKSEALSLPTVRDWTLEDSSQELWK

SEQ ID NO: 1001 - protein, 902 aa, Homo sapiens
MADPEVCCFITKILCAHGGRMALDALLQEIALSEPQLCEVLQVAGPDRFVVLETGGEAGITRSVVATTRARVCRRKYCQRPCDNLHLCKLNLLGRCNYSQSERNLCKYSHEVLSEENFKVLKNHELSGLNKEELAVLLLQSDPFFMPEICKSYKGEGRQQICNQQPPCSRLHICDHFTRGNCRFPNCLRSHNLMDRKVLAIMREHGLNPDVVQNIQDICNSKHMQKNPPGPRAPSSHRRNMAYRARSKSRDRFFQGSQEFLASASASAERSCTPSPDQISHRASLEDAPVDDLTRKFTYLGSQDRARPPSGSSKATDLGGTSQAGTSQRFLENGSQEDLLHGNPGSTYLASNSTSAPNWKSLTSWTNDQGARRKTVFSPTLPAARSSLGSLQTPEAVTTRKGTGLLSSDYRIINGKSGTQDIQPGPLFNNNADGVATDITSTRSLNYKSTSSGHREISSPRIQDAGPASRDVQATGRIADDADPRVALVNDSLSDVTSTTSSRVDDHDSEEICLDHLCKGCPLNGSCSKVHFHLPYRWQMLIGKTWTDFEHMETIEKGYCNPGIHLCSVGSYTINFRVMSCDSFPIRRLSTPSSVTKPANSVFTTKWIWYWKNESGTWIQYGEEKDKRKNSNVDSSYLESLYQSCPRGVVPFQAGSRNYELSFQGMIQTNIASKTQKDVIRRPTFVPQWYVQQMKRGPDHQPAKTSSVSLTATFRPQEDFCFLSSKKYKLSEIHHLHPEYVRVSEHFKASMKNFKIEKIKKIENSELLDKFTWKKSQMKEEGKLLFYATSRAYVESICSNNFDSFLHETHENKYGKGIYFAKDAIYSHKNCPYDAKNVVMFVAQVLVGKFTEGNITYTSPPPQFDSCVDTRSNPSVFVIFQKDQVYPQYVIEYTEDKACVIS

SEQ ID NO: 1002 - protein, 632 aa, Homo sapiens
MQREEGFNTKMADGPDEYDTEAGCVPLLHPEEIKPQSHYNHGYGEPLGRKTHIDDYSTWDIVKATQYGIYERCRELVEAGYDVRQPDKENVTLLHWAAINNRIDLVKYYISKGAIVDQLGGDLNSTPLHWATRQGHLSMVVQLMKYGADPSLIDGEGCSCIHLAAQFGHTSIVAYLIAKGQDVDMMDQNGMTPLMWAAYRTHSVDPTRLLLTFNVSVNLGDKYHKNTALHWAVLAGNTTVISLLLEAGANVDAQNIKGESALDLAKQRKNVWMINHLQEARQAKGYDNPSFLRKLKADKEFRQKVMLGTPFLVIWLVGFIADLNIDSWLIKGLMYGGVWATVQFLSKSFFDHSMHSALPLGIYLATKFWMYVTWFFWFWNDLNFLFIHLPFLANSVALFYNFGKSWKSDPGIIKATEEQKKKTIVELAETGSLDLSIFCSTCLIRKPVRSKHCGVCNRCIAKFDHHCPWVGNCVGAGNHRYFMGYLFFLLFMICWMIYGCISYWGLHCETTYTKDGFWTYITQIATCSPWMFWMFLNSVFHFMWVAVLLMCQMYQISCLGITTNERMNARRYKHFKVTTTSIESPFNHGCVRNIIDFFEFRCCGLFRPVIVDWTRQYTIEYDQISGSGYQLV

SEQ ID NO: 1003 - protein, 388 aa, Homo sapiens
MKDCEYQQISPGAAPLPASPGARRPGPAASPTPGPGPAPPAAPAPPRWSSSGSGSGSGSGSLGRRPRRKWEVFPGRNRFYCGGRLMLAGHGGVFALTLLLILTTTGLFFVFDCPYLARKLTLAIPIIAAILFFFVMSCLLQTSFTDPGILPRATVCEAAALEKQIDNTGSSTYRPPPRTREVLINGQMVKLKYCFTCKMFRPPRTSHCSVCDNCVERFDHHCPWVGNCVGRRNYRFFYAFILSLSFLTAFIFACVVTHLTLRAQGSNFLSTLKETPASVLELVICFFSIWSILGLSGFHTYLVASNLTTNEDIKGSWSSKRGGEASVNPYSHKSIITNCCAVLCGPLPPSLIDRRGFVQSDTVLPSPIRSDEPACRAKPDASMVGGHP

SEQ ID NO: 1004 - protein, 213 aa, Homo sapiens
MAQETNQTPGPMLCSTGCGFYGNPRTNGMCSVCYKEHLQRQQNSGRMSPMGTASGSNSPTSDSASVQRADTSLNNCEGAAGSTSEKSRNVPVAALPVTQQMTEMSISREDKITTPKTEVSEPVVTQPSPSVSQPSTSQSEEKAPELPKPKKNRCFMCRKKVGLTGFDCRCGNLFCGLHRYSDKHNCPYDYKAEAAAKIRKENPVVVAEKIQRI

SEQ ID NO: 1005 - protein, 1989 aa, Homo sapiens
MATADTPAPASSGLSPKEEGELEDGEISDDDNNSQIRSRSSSSSSGGGLLPYPRRRPPHSARGGGSGGGGGSSSSSSSSQQQLRNFSRSRHASERGHLRGPSSYRPKEPFRSHPPSVRMPSSSLSESSPRPSFWERSHLALDRFRFRGRPYRGGSRWSRGRGVGERGGKPGCRPPLGGGAGSGFSSSQSWREPSPPRKSSKSFGRSPSRKQNYSSKNENCVEETFEDLLLKYKQIQLELECINKDEKLALSSKEENVQEDPKTLNFEDQTSTDNVSITKDSSKEVAPEEKTQVKTFQAFELKPLRQKLTLPGDKNRLKKVKDGAKPLSLKSDTTDSSQGLQDKEQNLTRRISTSDILSEKKLGEDEEELSELQLRLLALQSASKKWQQKEQQVMKESKEKLTKTKTVQQKVKTSTKTHSAKKVSTTAKQALRKQQTKAWKKLQQQKEQERQKEEDQRKQAEEEERRKREEEIRKIRDLSNQEEQYNRFMKLVGGKRRSRSKSSDPDLRRSLDKQPTDSGGGIYQYDNYEEVAMDTDSETSSPAPSPVQPPFFSECSLGYFSPAPSLSLPPPPQVSSLPPLSQPYVEGLCVSLEPLPPLPPLPPLPPEDPEQPPKPPFADEEEEEEMLLREELLKSLANKRAFKPEETSSNSDPPSPPVLNNSHPVPRSNLSIVSINTVSQPRIQNPKFHRGPRLPRTVISLPKHKSVVVTLNDSDDSESDGEASKSTNSVFGGLESMIKEARRTAEQASKPKVPPKSEKENDPLRTPEALPEEKKIEYRLLKEEIANREKQRLIKSDQLKTSSSSPANSDVEIDGIGRIAMVTKQVTDAESKLKKHRILLMKDESVLKNLVQQEAKKKESVRNAEAKITKLTEQLQATEKILNVNRMFLKKLQEQIHRVQQRVTIKKALTLKYGEELARAKAVASKEIGKRKLEQDRFGPNKMMRLDSSPVSSPRKHSAELIAMEKRRLQKLEYEYALKIQKLKEARALKAKEQQNISPVVEEEPEFSLPQPSLHDLTQDKLTLDTEENDVDDEILSGSSRERRRSFLESNYFTKPNLKHTDTANKECINKLNKNTVEKPELFLGLKIGELQKLYSKADSLKQLILKTTTGITEKVLHGQEISVDVDFVTAQSKTMEVKPCPFRPYHSPLLVFKSYRFSPYYRTKEKLPLSSVSYSNMIEPDQCFCRFDLTGTCNDDDCQWQHIQDYTLSRKQLFQDILSYNLSLIGCAETSTNEEITASAEKYVEKLFGVNKDRMSMDQMAVLLVSNINESKGHTPPFTTYKDKRKWKPKFWRKPISDNSFSSDEEQSTGPIKYAFQPENQINVPALDTVVTPDDVRYFTNETDDIANLEASVLENPSHVQLWLKLAYKYLNQNEGECSESLDSALNVLARALENNKDNPEIWCHYLRLFSKRGTKDEVQEMCETAVEYAPDYQSFWTFLHLESTFEEKDYVCERMLEFLMGAAKQETSNILSFQLLEALLFRVQLHIFTGRCQSALAILQNALKSANDGIVAEYLKTSDRCLAWLAYIHLIEFNILPSKFYDPSNDNPSRIVNTESFVMPWQAVQDVKTNPDMLLAVFEDAVKACTDESLAVEERIEACLPLYTNMIALHQLLERYEAAMELCKSLLESCPINCQLLEALVALYLQTNQHDKARAVWLTAFEKNPQNAEVFYHMCKFFILQNRGDNLLPFLRKFIASFFKPGFEKYNNLDLFRYLLNIPGPIDIPSRLCKGNFDDDMFNHQVPYLWLIYCLCHPLQSSIKETVEAYEAALGVAMRCDIVQKIWMDYLVFANNRAAGSRNKVQEFKFFTDLVNRCLVTVPARYPIPFSSADYWSNYEFHNRVIFFYLSCVPKTQHSKTLERFCSVMPANSGLALRLLQHEWEESNVQILKLQAKMFTYNIPTCLATWKIAIAAEIVLKGQREVHRLYQRALQKLPLCASLWKDQLLFEASEGGKTDNLRKLVSKCQEIGVSLNELLNLNSNKTESKNH

SEQ ID NO: 1006 - protein, 1539 aa, Homo sapiens
MDSYFKAAVSDLDKLLDDFEQNPDEQDYLQDVQNAYDSNHCSVSSELASSQRTSLLPKDQECVNSCASSETSYGTNESSLNEKTLKGLTSIQNEKNVTGLDLLSSVDGGTSDEIQPLYMGRCSKPICDLISDMGNLVHATNSEEDIKKLLPDDFKSNADSLIGLDLSSVSDTPCVSSTDHDSDTVREQQNDISSELQNREIGGIKELGIKVDTTLSDSYNYSGTENLKDKKIFNQLESIVDFNMSSALTRQSSKMFHAKDKLQHKSQPCGLLKDVGLVKEEVDVAVITAAECLKEEGKTSALTCSLPKNEDLCLNDSNSRDENFKLPDFSFQEDKTVIKQSAQEDSKSLDLKDNDVIQDSSSALHVSSKDVPSSLSCLPASGSMCGSLIESKARGDFLPQHEHKDNIQDAVTIHEEIQNSVVLGGEPFKENDLLKQEKCKSILLQSLIEGMEDRKIDPDQTVIRAESLDGGDTSSTVVESQEGLSGTHVPESSDCCEGFINTFSSNDMDGQDLDYFNIDEGAKSGPLISDAELDAFLTEQYLQTTNIKSFEENVNDSKSQMNQIDMKGLDDGNINNIYFNAEAGAIGESHGINIICEIVDKQNTIENGLSLGEKSTIPVQQGLPTSKSEITNQLSVSDINSQSVGGARPKQLFSLPSRTRSSKDLNKPDVPDTIESEPSTADTVVPITCAIDSTADPQVSFNSNYIDIESNSEGGSSFVTANEDSVPENTCKEGLVLGQKQPTWVPDSEAPNCMNCQVKFTFTKRRHHCRACGKVFCGVCCNRKCKLQYLEKEARVCVVCYETISKAQAFERMMSPTGSNLKSNHSDECTTVQPPQENQTSSIPSPATLPVSALKQPGVEGLCSKEQKRVWFADGILPNGEVADTTKLSSGSKRCSEDFSPLSPDVPMTVNTVDHSHSTTVEKPNNETGDITRNEIIQSPISQVPSVEKLSMNTGNEGLPTSGSFTLDDDVFAETEEPSSPTGVLVNSNLPIASISDYRLLCDINKYVCNKISLLPNDEDSLPPLLVASGEKGSVPVVEEHPSHEQIILLLEGESFHPVTFVLNANLLVNVKFIFYSSDKYWYFSTNGLHGLGQAEIIILLLCLPNEDTIPKDIFRLFITIYKDALKGKYIENLDNITFTESFLSSKDHGGFLFITPTFQKLDDLSLPSNPFLCGILIQKLEIPWAKVFPMRLMLRLGAEYKAYPAPLTSIRGRKPLFGEIGHTIMNLLVDLRNYQYTLHNIDQLLIHMEMGKSCIKIPRKKYSDVMKVLNSSNEHVISIGASFSTEADSHLVCIQNDGIYETQANSATGHPRKVTGASFVVFNGALKTSSGFLAKSSIVEDGLMVQITPETMNGLRLALREQKDFKITCGKVDAVDLREYVDICWVDAEEKGNKGVISSVDGISLQGFPSEKIKLEADFETDEKIVKCTEVFYFLKDQDLSILSTSYQFAKEIAMACSAALCPHLKTLKSNGMNKIGLRVSIDTDMVEFQAGSEGQLLPQHYLNDLDSALIPVIHGGTSNSSLPLEIELVFFIIEHLF

SEQ ID NO: 1007 - protein, 1067 aa, Homo sapiens
MNSMDRHIQQTNDRLQCIKQHLQNPANFHNAATELLDWCGDPRAFQRPFEQSLMGCLTVVSRVAAQQGFDLDLGYRLLAVCAANRDKFTPKSAALLSSWCEELGRLLLLRHQKSRQSDPPGKLPMQPPLSSMSSMKPTLSHSDGSFPYDSVPWQQNTNQPPGSLSVVTTVWGVTNTSQSQVLGNPMANANNPMNPGGNPMASGMTTSNPGLNSPQFAGQQQQFSAKAGPAQPYIQQSMYGRPNYPGSGGFGASYPGGPNAPAGMGIPPHTRPPADFTQPAAAAAAAAVAAAAATATATATATVAALQETQNKDINQYGPMGPTQAYNSQFMNQPGPRGPASMGGSMNPASMAAGMTPSGMSGPPMGMNQPRPPGISPFGTHGQRMPQQTYPGPRPQSLPIQNIKRPYPGEPNYGNQQYGPNSQFPTQPGQYPAPNPPRPLTSPNYPGQRMPSQPSSGQYPPPTVNMGQYYKPEQFNGQNNTFSGSSYSNYSQGNVNRPPRPVPVANYPHSPVPGNPTPPMTPGSSIPPYLSPSQDVKPPFPPDIKPNMSALPPPPANHNDELRLTFPVRDGVVLEPFRLEHNLAVSNHVFHLRPTVHQTLMWRSDLELQFKCYHHEDRQMNTNWPASVQVSVNATPLTIERGDNKTSHKPLHLKHVCQPGRNTIQITVTACCCSHLFVLQLVHRPSVRSVLQGLLKKRLLPAEHCITKIKRNFSSVAASSGNTTLNGEDGVEQTAIKVSLKCPITFRRIQLPARGHDCKHVQCFDLESYLQLNCERGTWRCPVCNKTALLEGLEVDQYMWGILNAIQHSEFEEVTIDPTCSWRPVPIKSDLHIKDDPDGIPSKRFKTMSPSQMIMPNVMEMIAALGPGPSPYPLPPPPGGTNSNDYSSQGNNYQGHGNFDFPHGNPGGTSMNDFMHGPPQLSHPPDMPNNMAALEKPLSHPMQETMPHAGSSDQPHPSIQQGLHVPHPSSQSGPPLHHSGAPPPPPSQPPRQPPQAAPSSHPHSDLTFNPSSALEGQAGAQGASDMPEPSLDLLPELTNPDELLSYLDPPDLPSNSNDDLLSLFENN

SEQ ID NO: 1008 - protein, 638 aa, Homo sapiens
MLLAQINRDSQGMTEFPGGGMEAQHVTLCLTEAVTVADGDNLENMEGVSLQAVTLADGSTAYIQHNSKDAKLIDGQVIQLEDGSAAYVQHVPIPKSTGDSLRLEDGQAVQLEDGTTAFIHHTSKDSYDQSALQAVQLEDGTTAYIHHAVQVPQSDTILAIQADGTVAGLHTGDATIDPDTISALEQYAAKVSIDGSESVAGTGMIGENEQEKKMQIVLQGHATRVTAKSQQSGEKAFRCEYDGCGKLYTTAHHLKVHERSHTGDRPYQCEHAGCGKAFATGYGLKSHVRTHTGEKPYRCSEDNCTKSFKTSGDLQKHIRTHTGERPFKCPFEGCGRSFTTSNIRKVHVRTHTGERPYYCTEPGCGRAFASATNYKNHVRIHTGEKPYVCTVPGCDKRFTEYSSLYKHHVVHTHSKPYNCNHCGKTYKQISTLAMHKRTAHNDTEPIEEEQEAFFEPPPGQGEDVLKGSQITYVTGVEGDDVVSTQVATVTQSGLSQQVTLISQDGTQHVNISQADMQAIGNTITMVTQDGTPITVPAHDAVISSAGTHSVAMVTAEGTEGEQVAIVAQDLAAFHTASSEMGHQQHSHHLVTTETRPLTLVATSNGTQIAVQLGEQPSLEEAIRIASRIQQGETPGLDD

SEQ ID NO: 1009 - protein, 794 aa, Homo sapiens
MNIDDKLEGLFLKCGGIDEMQSSRTMVVMGGVSGQSTVSGELQDSVLQDRSMPHQEILAADEVLQESEMRQQDMISHDELMVHEETVKNDEEQMETHERLPQGLQYALNVPISVKQEITFTDVSEQLMRDKKQIREPVDLQKKKKRKQRSPAKILTINEDGSLGLKTPKSHVCEHCNAAFRTNYHLQRHVFIHTGEKPFQCSQCDMRFIQKYLLQRHEKIHTGEKPFRCDECGMRFIQKYHMERHKRTHSGEKPYQCEYCLQYFSRTDRVLKHKRMCHENHDKKLNRCAIKGGLLTSEEDSGFSTSPKDNSLPKKKRQKTEKKSSGMDKESALDKSDLKKDKNDYLPLYSSSTKVKDEYMVAEYAVEMPHSSVGGSHLEDASGEIHPPKLVLKKINSKRSLKQPLEQNQTISPLSTYEESKVSKYAFELVDKQALLDSEGNADIDQVDNLQEGPSKPVHSSTNYDDAMQFLKKKRYLQAASNNSREYALNVGTIASQPSVTQAAVASVIDESTTASILESQALNVEIKSNHDKNVIPDEVLQTLLDHYSHKANGQHEISFSVADTEVTSSISINSSEVPEVTPSENVGSSSQASSSDKANMLQEYSKFLQQALDRTSQNDAYLNSPSLNFVTDNQTLPNQPAFSSIDKQVYATMPINSFRSGMNSPLRTTPDKSHFGLIVGDSQHSFPFSGDETNHASATSTQDFLDQVTSQKKAEAQPVHQAYQMSSFEQPFRAPYHGSRAGIATQFSTANGQVNLRGPGTSAEFSEFPLVNVNDNRAGMTSSPDATTGQTFG

SEQ ID NO: 1010 - protein, 548 aa, Homo sapiens
MNIEVVEVLTLNQEVAGPRNAQIQALYAEDGSLSADAPSEQVQQQGKHPGDPEAARQRFRQFRYKDMTGPREALDQLRELCHQWLQPKARSKEQILELLVLEQFLGALPVKLRTWVESQHPENCQEVVALVEGVTWMSEEEVLPAGQPAEGTTCCLEVTAQQEEKQEDAAICPVTVLPEEPVTFQDVAVDFSREEWGLLGPTQRTEYRDVMLETFGHLVSVGWETTLENKELAPNSDIPEEEPAPSLKVQESSRDCALSSTLEDTLQGGVQEVQDTVLKQMESAQEKDLPQKKHFDNRESQANSGALDTNQVSLQKIDNPESQANSGALDTNQVLLHKIPPRKRLRKRDSQVKSMKHNSRVKIHQKSCERQKAKEGNGCRKTFSRSTKQITFIRIHKGSQVCRCSECGKIFRNPRYFSVHKKIHTGERPYVCQDCGKGFVQSSSLTQHQRVHSGERPFECQECGRTFNDRSAISQHLRTHTGAKPYKCQDCGKAFRQSSHLIRHQRTHTGERPYACNKCGKAFTQSSHLIGHQRTHNRTKRKKKQPTS

SEQ ID NO: 1011 - protein, 2723 aa, Homo sapiens
MADEEAEQERLSCGEGGCVAELQRLGERLQELELQLRESRVPAVEAATDYCQQLCQTLLEYAEKWKTSEDPLPLLEVYTVAIQSYVKARPYLTSECENVALVLERLALSCVELLLCLPVELSDKQWEQFQTLVQVAHEKLMENGSCELHFLATLAQETGVWKNPVLCTILSQEPLDKDKVNEFLAFEGPILLDMRIKHLIKTNQLSQATALAKLCSDHPEIGIKGSFKQTYLVCLCTSSPNGKLIEEISEVDCKDALEMICNLESEGDEKSALVLCTAFLSRQLQQGDMYCAWELTLFWSKLQQRVEPSIQVYLERCRQLSLLTKTVYHIFFLIKVINSETEGAGLATCIELCVKALRLESTENTEVKISICKTISCLLPDDLEVKRACQLSEFLIEPTVDAYYAVEMLYNQPDQKYDEENLPIPNSLRCELLLVLKTQWPFDPEFWDWKTLKRQCLALMGEEASIVSSIDELNDSEVYEKVVDYQEESKETSMNGLSGGVGANSGLLKDIGDEKQKKREIKQLRERGFISARFRNWQAYMQYCVLCDKEFLGHRIVRHAQKHYKDGIYSCPICAKNFNSKETFVPHVTLHVKQSSKERLAAMKPLRRLGRPPKITTTNENQKTNTVAKQEQRPIKKNSLYSTDFIVFNDNDGSDDENDDKDKSYEPEVIPVQKPVPVNEFNCPVTFCKKGFKYFKNLIAHVKGHKDNEDAKRFLEMQSKKVICQYCRRHFVSVTHLNDHLQMHCGSKPYICIQMKCKAGFNSYAELLTHRKEHQVFRAKCMFPKCGRIFSEAYLLYDHEAQHYNTYTCKFTGCGKVYRSQGELEKHLDDHSTPPEKVLPPEAQLNSSGDSIQPSEVNQNTAENIEKERSMLPSENNIENSLLADRSDAWDKSKAESAVTKQDQISASELRQANGPLSNGLENPATTPLLQSSEVAVSIKVSLNQGIEDNFGKQENSTVEGSGEALVTDLHTPVEDTCNDLCHPGFQERKEQDCFNDAHVTQNSLVNSETLKIGDLTPQNLERQVNNLMTFSVQNQAAFQNNLPTSKFECGDNVKTSSNLYNLPLKTLESIAFVPPQSDLSNSLGTPSVPPKAPVQKFSCQVEGCTRTYNSSQSIGKHMKTAHPDQYAAFKMQRKSKKGQKANNLNTPNNGKFVYFLPSPVNSSNPFFTSQTKANGNPACSAQLQHVSPPIFPAHLASVSTPLLSSMESVINPNITSQDKNEQGGMLCSQMENLPSTALPAQMEDLTKTVLPLNIDSGSDPFLPLPAESSSMSLFPSPADSGTNSVFSQLENNTNHYSSQIEGNTNSSFLKGGNGENAVFPSQVNVANNFSSTNAQQSAPEKVKKDRGRGPNGKERKPKHNKRAKWPAIIRDGKFICSRCYRAFTNPRSLGGHLSKRSYCKPLDGAEIAQELLQSNGQPSLLASMILSTNAVNLQQPQQSTFNPEACFKDPSFLQLLAENRSPAFLPNTFPRSGVTNFNTSVSQEGSEIIKQALETAGIPSTFEGAEMLSHVSTGCVSDASQVNATVMPNPTVPPLLHTVCHPNTLLTNQNRTSNSKTSSIEECSSLPVFPTNDLLLKTVENGLCSSSFPNSGGPSQNFTSNSSRVSVISGPQNTRSSHLNKKGNSASKRRKKVAPPLIAPNASQNLVTSDLTTMGLIAKSVEIPTTNLHSNVIPTCEPQSLVENLTQKLNNVNNQLFMTDVKENFKTSLESHTVLAPLTLKTENGDSQMMALNSCTTSINSDLQISEDNVIQNFEKTLEIIKTAMNSQILEVKSGSQGAGETSQNAQINYNIQLPSVNTVQNNKLPDSSPFSSFISVMPTKSNIPQSEVSHKEDQIQEILEGLQKLKLENDLSTPASQCVLINTSVTLTPTPVKSTADITVIQPVSEMINIQFNDKVNKPFVCQNQGCNYSAMTKDALFKHYGKIHQYTPEMILEIKKNQLKFAPFKCVVPTCTKTFTRNSNLRAHCQLVHHFTTEEMVKLKIKRPYGRKSQSENVPASRSTQVKKQLAMTEENKKESQPALELRAETQNTHSNVAVIPEKQLVEKKSPDKTESSLQVITVTSEQCNTNALTNTQTKGRKIRRHKKEKEEKKRKKPVSQSLEFPTRYSPYRPYRCVHQGCFAAFTIQQNLILHYQAVHKSDLPAFSAEVEEESEAGKESEETETKQTLKEFRCQVSDCSRIFQAITGLIQHYMKLHEMTPEEIESMTASVDVGKFPCDQLECKSSFTTYLNYVVHLEADHGIGLRASKTEEDGVYKCDCEGCDRIYATRSNLLRHIFNKHNDKHKAHLIRPRRLTPGQENMSSKANQEKSKSKHRGTKHSRCGKEGIKMPKTKRKKKNNLENKNAKIVQIEENKPYSLKRGKHVYSIKARNDALSECTSRFVTQYPCMIKGCTSVVTSESNIIRHYKCHKLSKAFTSQHRNLLIVFKRCCNSQVKETSEQEGAKNDVKDSDTCVSESNDNSRTTATVSQKEVEKNEKDEMDELTELFITKLINEDSTSVETQANTSSNVSNDFQEDNLCQSERQKASNLKRVNKEKNVSQNKKRKVEKAEPASAAELSSVRKEEETAVAIQTIEEHPASFDWSSFKPMGFEVSFLKFLEESAVKQKKNTDKDHPNTGNKKGSHSNSRKNIDKTAVTSGNHVCPCKESETFVQFANPSQLQCSDNVKIVLDKNLKDCTELVLKQLQEMKPTVSLKKLEVHSNDPDMSVMKDISIGKATGRGQY

SEQ ID NO: 1012 - protein, 858 aa, Homo sapiens
MDLPALLPAPTARGGQHGGGPGPLRRAPAPLGASPARRRLLLVRGPEDGGPGARPGEASGPSPPPAEDDSDGDSFLVLLEVPHGGAAAEAAGSQEAEPGSRVNLASRPEQGPSGPAAPPGPGVAPAGAVTISSQDLLVRLDRGVLALSAPPGPATAGAAAPRRAPQASGPSTPGYRCPEPQCALAFAKKHQLKVHLLTHGGGQGRRPFKCPLEGCGWAFTTSYKLKRHLQSHDKLRPFGCPVGGCGKKFTTVYNLKAHMKGHEQESLFKCEVCAERFPTHAKLSSHQRSHFEPERPYKCDFPGCEKTFITVSALFSHNRAHFREQELFSCSFPGCSKQYDKACRLKIHLRSHTGERPFICDSDSCGWTFTSMSKLLRHRRKHDDDRRFTCPVEGCGKSFTRAEHLKGHSITHLGTKPFECPVEGCCARFSARSSLYIHSKKHVQDVGAPKSRCPVSTCNRLFTSKHSMKAHMVRQHSRRQDLLPQLEAPSSLTPSSELSSPGQSELTNMDLAALFSDTPANASGSAGGSDEALNSGILTIDVTSVSSSLGGNLPANNSSLGPMEPLVLVAHSDIPPSLDSPLVLGTAATVLQQGSFSVDDVQTVSAGALGCLVALPMKNLSDDPLALTSNSNLAAHITTPTSSSTPRENASVPELLAPIKVEPDSPSRPGAVGQQEGSHGLPQSTLPSPAEQHGAQDTELSAGTGNFYLESGGSARTDYRAIQLAKEKKQRGAGSNAGASQSTQRKIKEGKMSPPHFHASQNSWLCGSLVVPSGGRPGPAPAAGVQCGAQGVQVQLVQDDPSGEGVLPSARGPATFLPFLTVDLPVYVLQEVLPSSGGPAGPEATQFPGSTINLQDLQ

SEQ ID NO: 1013 - protein, 572 aa, Homo sapiens
MAAPRPSPAISVSVSAPAFYAPQKKFGPVVAPKPKVNPFRPGDSEPPPAPGAQRAQMGRVGEIPPPPPEDFPLPPPPLAGDGDDAEGALGGAFPPPPPPIEESFPPAPLEEEIFPSPPPPPEEEGGPEAPIPPPPQPREKVSSIDLEIDSLSSLLDDMTKNDPFKARVSSGYVPPPVATPFSSKSSTKPAAGGTAPLPPWKSPSSSQPLPQVPAPAQSQTQFHVQPQPQPKPQVQLHVQSQTQPVSLANTQPRGPPASSPAPAPKFSPVTPKFTPVASKFSPGAPGGSGSQPNQKLGHPEALSAGTGSPQPPSFTYAQQREKPRVQEKQHPVPPPAQNQNQVRSPGAPGPLTLKEVEELEQLTQQLMQDMEHPQRQNVAVNELCGRCHQPLARAQPAVRALGQLFHIACFTCHQCAQQLQGQQFYSLEGAPYCEGCYTDTLEKCNTCGEPITDRMLRATGKAYHPHCFTCVVCARPLEGTSFIVDQANRPHCVPDYHKQYAPRCSVCSEPIMPEPGRDETVRVVALDKNFHMKCYKCEDCGKPLSIEADDNGCFPLDGHVLCRKCHTARAQT

SEQ ID NO: 1014 - DNA, 2013 bp, Homo sapiens
atggcaaagagaataaaagctaagcccacttcagacaaacctggaagtccatatcgctctgtcacacacttcgactcactagctgtaatagacatccctggagcagatactctggataaattatttgaccatgctgtatccaagtttgggaagaaggacagccttgggaccagggaaatcctaagtgaagaaaatgaaatgcagccaaatggaaaagtttttaagaagttaattcttgggaattataaatggatgaactatcttgaagtgaatcgcagagtgaataactttggtagtggactcactgcactgggactaaaaccaaagaacaccattgccatcttctgtgagaccagggccgaatggatgattgcagcacagacctgctttaagtacaactttcctcttgtgactttatatgccacacttggcaaagaagcagtagttcatgggctaaatgaatctgaggcttcctatctgattaccagtgttgaacttctggaaagtaaacttaagactgcattgttagatatcagttgtgttaaacatatcatttatgtggacaataaggctatcaataaagcagagtaccctgaaggatttgagattcacagcatgcaatcagtagaagagttgggatctaacccagaaaacttgggcattcctccaagtagaccaacgccttcagacatggccattgttatgtatactagtggttctactggccgacctaagggagtgatgatgcatcatagcaatttgatagctggaatgacaggccagtgtgaaagaatacctggactgggaccgaaggacacatatattggctacttgcctttggctcatgtgctagaactgacagcagagatatcttgctttacctatggctgcaggattggatattcttctccgcttacactctctgaccagtccagcaaaattaaaaaaggaagcaaaggagactgtactgtactgaagcccacacttatggctgctgttccggaaatcatggatagaatttataagaatgttatgagcaaagtccaagagatgaattatattcagaaaactctgttcaagatagggtatgattacaaattggaacagatcaaaaagggatatgatgcacctctttgcaatctgttactgtttaaaaaggtcaaggccctgctgggagggaatgtccgcatgatgctgtctggaggggccccgctatctcctcagacacaccgattcatgaatgtctgcttctgctgcccaattggccagggttatggactgacagaatcatgtggtgctgggacagttactgaagtaactgactatactactggcagagttggagcacctcttatttgctgtgaaattaagctaaaagactggcaagaaggcggttatacaattaatgacaagccaaaccccagaggtgaaatcgtaattggtggacagaacatctccatgggatattttaaaaatgaagagaaaacagcagaagattattctgtggatgaaaatggacaaaggtggttttgcactggtgatattggagaattccatcccgatggatgtttacagattatagatcgtaagaaagatctagtgaagttacaagcaggagagtatgtatctcttgggaaagtagaagctgcactgaagaattgtccacttattgacaacatctgtgcttttgccaaaagtgatcagtcctatgtgatcagttttgtggttcctaaccagaaaaggttgacacttttggcacaacagaaaggggtagaaggaacttgggttgatatctgcaataatcctgctatggaagctgaaatactgaaagaaattcgagaagctgcaaatgccatgaaattggagcgatttgaaattccaatcaaggttcgattaagcccagagccatggacccctgaaactggtttggtaactgatgctttcaaactgaaaaggaaggagctgaggaaccattacctcaaagacattgaacgaatgtatgggggcaaataa

SEQ ID NO: 1015 - DNA, 1038 bp, Homo sapiens
atgacgtcagtcagagaaaatattctctttggaatgggaaatcctctgcttgacatctctgctgtagtggacaaagatttccttgataagtattctctgaaaccaaatgaccaaatcttggctgaagacaaacacaaggaactgtttgatgaacttgtgaaaaaattcaaagtcgaatatcatgctggtggctctacccagaattcaattaaagtggctcagtggatgattcaacagccacacaaagcagcaacattttttggatgcattgggatagataaatttggggagatcctgaagagaaaagctgctgaagcccatgtggatgctcattactacgagcagaatgagcagccaacaggaacttgtgctgcatgcatcactggtgacaacaggtccctcatagctaatcttgctgctgccaattgttataaaaaggaaaaacatcttgatctggagaaaaactggatgttggtagaaaaagcaagagtttgttatatagcaggcttttttcttacagtttccccagagtcagtattaaaggtggctcaccatgcttctgaaaacaacaggattttcactttgaatctatctgcaccgtttattagccagttctacaaggaatcattgatgaaagttatgccttatgttgatatactttttggaaatgagacagaagctgccacttttgctagagagcaaggctttgagactaaagacattaaagagatagccaaaaagacacaagccctgccaaagatgaactcaaagaggcagcgaatcgtgatcttcacccaagggagagatgacactataatggctacagaaagtgaagtcactgcttttgctgtcttggatcaagaccagaaagaaattattgataccaatggagctggagatgcatttgttggaggttttctgtctcaactggtctctgacaagcctctgactgaatgtatccgtgctggccactatgcagcaagcatcataattagacggactggctgcacctttcctgagaagccagacttccactga

SEQ ID NO: 1016 - DNA, 1455 bp, Homo sapiens
atggcggctggaggcgatcatggttcgcccgacagctaccgctcacctcttgcctcccgctatgccagcccggagatgtgcttcgtgtttagcgacaggtataaattccggacatggcggcagctgtggctgtggctggcggaggccgagcagacattgggtttgcctatcacagatgaacaaatccaggagatgaaatcaaacctggagaacatcgacttcaagatggcagctgaggaagagaaacgtttacgacatgatgtgatggctcacgtgcacacatttggccactgctgtccaaaagctgcaggcattattcaccttggtgctacttcttgctatgttggagacaatactgacttgattattcttagaaatgcacttgacctgcttttgccaaagcttgccagagtgatctctcggcttgccgactttgctaaggaacgagccagtctacccacattaggtttcacacatttccagcctgcacagctgaccacagttgggaaacgttgctgtctttggattcaggatctttgcatggatctccagaacttgaagcgtgtccgagatgacctgcgcttccggggagtaaagggtaccactggcactcaggccagtttcctgcagctctttgagggagatgaccataaggtagagcagcttgacaagatggtgacagaaaaggcaggatttaagagagctttcatcatcacagggcagacatatacacgaaaagtggatattgaagtactgtctgtgctggctagcttgggggcatcagtgcacaagatttgcaccgacatacgcctcctggcaaacctcaaggagatggaggaaccctttgaaaaacagcagattggctcaagtgcgatgccatataagcggaatcccatgcgttcagaacgttgctgcagtcttgcccgccacctgatgacccttgtcatggacccgctacagacagcatctgtccagtggtttgaacgcacactggatgatagtgccaaccgacggatctgtttggccgaggcatttcttaccgcagatactatattgaatacgctgcagaacatttctgaaggattggtcgtgtaccccaaagtaattgaacggcgcattcggcaagagctgcctttcatggccacagagaacatcatcatggccatggtcaaagctggaggtagccgccaggattgccatgagaaaatcagagtgctttctcagcaggcagcttctgtggttaagcaggaagggggtgacaatgacctcatagagcgtatccaggttgatgcctacttcagtcccattcactcccagttggatcatttactggatccttcttctttcactggtcgtgcctcccagcaggtgcagagattcttagaagaggaggtgtatcccctgttaaaaccatatgaaagcgtgatgaaggtgaaagcagaattatgtctgtag

SEQ ID NO: 1017 - DNA, 6828 bp, Homo sapiens
atggcggcggagcggcgctgtggaagtatgcgagacttaagagctcaagtgactagtggtctcctgccatttccagaagtgactcttcaagcccttggagaagacgaaataacattagaatctgtgcttcgtggaaagtttgctgcagggaaaaatggacttgcttgcttggcttgtggtccacaacttgaggtagtaaactctataacaggagagcgattgtctgcttacagattcagtggagtcaatgaacagcctcctgtagttttagctgtgaaagaattctcttggcagaagagaactggattattaataggattggaagaaacagaagggagtgttctctgtctttatgaccttggaatatcaaaagtagttaaagcagttgttcttcctggaagggtaacagctattgaacctataattaatcatggaggagccagtgcaagcactcagcatttacatccaagtctgcgatggctttttggagtggcagctgtggtcactgatgttggacagatccttcttgttgacctatgtttggatgacttgtcatgcaatcaaaatgaagttgaagcatcagatcttgaagttctaactggtatcccagctgaagtaccacacattagagaaagtgtaatgagacaagggcgccatctgtgtttccagttagtaagtccaacaggaacagctgtttcaactcttagttacataagcaggacaaatcagcttgctgtaggtttttctgatggctatctagcactttggaacatgaaaagcatgaaaagagaatattacatacaattggaaagtggacaagttcctgtatatgctgtcacttttcaagaacctgagaatgatcctcggaattgctgttacttgtgggctgttcagtctacacaagatagtgaaggggatgttttgagtttgcatctgctgcagctggcctttggtaatagaaagtgtttggcatcaggacaaatcttatatgaggggttagaatactgtgaagaaagatacaccctggacctgacaggtggcatgttccctttgaggggacagacgagtaataccaaattgttgggatgccagagtatagagaaatttcgatctcatggtgacagggaggaaggcgtgaatgaagctctatcgcctgacactagtgtttcagtctttacctggcaggtgaatatatatggacagggaaagccttctgtatatttggggctttttgatataaatcgttggtatcatgcacaaatgccagattcgttaaggtcaggagaatatctacataattgctcttattttgcactgtggtcattggagtctgttgtaagtaggacttctccacatggcatcttggatatattagtacatgagagaagtttaaatagaggagtccctccttcatatccacctcccgagcagttttttaatccaagcacttataattttgatgccacttgtttgttaaactcgggagttgttcatttaacttgtactggctttcagaaggagactttgacttttttaaagaaatcaggtccatcactcaatgaactcattcctgatggttataatcgatgtcttgtagctggccttctttccccaagatttgttgatgttcagccttccagtttaagccaagaagaacagttagaagctatattgtcagcagcaattcagactagttccctgggacttttgactggttatatccgaagatggataacagaagaacaaccaaattctgccactaatttgcgctttgttcttgaatggacgtggaataaagtggttctcacaaaagaggaatttgacagactatgtgtgccattatttgatggttcgtgtcatttcatggatccacaaactatacagtctatccagcaatgctatttgcttcttagcaatcttaatatagtcttgagctgttttgcatcagaagcccgagagatcactgagagaggactgatagacttaagcaataagtttgtggtttcccacctcatctgtcagtatgcacaagtggttctttggttctctcattctgggcttttaccagaaggcatagatgattctgtgcagttgtcaaggttatgctacaactaccctgtaattcagaactactacaccagtcgtcgacagaagtttgagcgtttatcaagagggaagtggaatcccgattgcttgatgattgatggactggtttctcagttaggagagcgaattgagaagttgtggaaacgagatgaaggaggcacaggaaaatatcctcctgctagtctgcatgcagtacttgatatgtacctattagacggcgttactgaagcagccaaacactctattaccatttatttgctacttgatattatgtattcctttcccaacaaaacagacactcccattgaatctttcccaactgtatttgccatttcttggggccaagttaaacttattcaggggttttggttgatagatcataatgactatgagagtggtttggatcttttgtttcatccagctactgcaaaacctttgtcatggcaacattcaaagattattcaggcattcatgagtcagggcgagcacagacaagccctcagatatattcagacaatgaagccaacagtgtccagtggtaacgatgttatccttcacctcactgttttgctttttaataggtgtatggttgaagcctggaattttttgcggcaacattgcaataggttgaatatagaggagttactgaagcacatgtatgaagtctgtcaggaaatgggcttgatggaagatttactgaagttaccatttacagacactgagcaggaatgtttagtgaaatttttgcagtccagtgccagcgttcagaatcatgaattccttttagtgcaccatttgcagcgtgccaattatgtgcctgccttgaagctgaaccaaactctgaagattaatgttatgaatgatcgtgatcctcgtttgcgggagagatcactggctcgaaattctatattagaccagtatggaaaaatccttcctagagtccatcgaaaattagccattgaacgagctaagccttatcatctgtcaacatcatcagtttttcgattagtttctagacccaaaccattatcagcagttccaaagcaagttgtaacaggaactgtgttgacaagatctgttttcatcaacaatgtgttatctaaaattggagaagtttgggcaagcaaagaacctataaatagcaccacacctttcaatagttctaaaatagaagaaccatctcctatagtgtattcgctcccagctccagagctgcctgaggcattttttggaacaccaatttcaaaagcatcacaaaaaatttctagactgctagatttggttgttcagcctgtcccccggccttctcagtgttcggagtttattcagcaaagctccatgaaatctcctttgtacctagtatcccgttcactgccctcaagttcgcaattaaaaggatcgcctcaggccatctccagggcttcagaattacatttgcttgaaactcctcttgtagttaagaaagctaaaagtttggccatgtcagttactacttctggattttctgagttcactcctcagtccatcctgaggtctactcttcgatcaacacctttagcatctccctctccatcacctggaaggtctcctcaacgacttaaagaaactagaatttcatttgtggaagaagatgtccacccaaaatggattcctggggctgcagatgatagcaaattagaagtatttactacacctaaaaaatgtgcagttccagtggaaactgaatggctgaagagcaaagataggaccacatcttttttcctgaacagccctgaaaaggagcatcaagaaatggatgaggggtcacaaagtttagagaaactggatgtgagcaaaggaaacagcagtgtttcaatcacatccgatgagactaccttagagtatcaggatgcaccgtcaccggaagaccttgaagagactgttttcacggcctctaagcccaaaagctcttccactgcactaactactaatgtaactgaacaaactgaaaaggatggagataaagatgtatttgcatcagaagtaactccttcagacctacagaaacaaatgggcaatttagaagatgcagaaacaaaggatctcttagttgcagcagaggcattttcagaattgaatcacttaagcccggttcaaggaactgaagcttctctttgtgcaccatcagtctatgaagggaaaatcttcacccagaagtccaaggtaccagtgttggacgaaggattaacatctgttgaaacctacacccctgcaattagagcaaatgacaataaatctatggctgatgtccttggtgatggtggaaactcctcgctcactatctctgaaggtcctattgtctctgagcgcaggcttaaccaggaagtagcgctgaacttaaaagaagatcatgaagtagaagttggtgtactaaaagaaagtgttgacttaccagaagaaaagcttccaatttctgacagccctcctgatactcaagaaattcatgtgattgaacaagaaaagcttgaagctcaagattcaggagaagaggctaggaatctttcatttaatgagttatatccctctggaacacttaagcttcagtacaattttgatactattgaccaacagttttgtgacttagctgataacaaagacactgctgaatgtgacattgctgaagtagatggggaactttttgtggctcaaagcaactttaccttgatattggaaggtgaagaaggagaagttgagccaggtgattttgcatcatctgatgtgttacctaaagcagctaacacagcaactgaagaaaaacttgtatgcagtggggaaaatgataatcatggacaaattgcaaatttgccatctgccgtaactagtgaccaaaagtcccaaaaagtagacactttaccatatgtgcctgaacctattaaagtagcaattgcagaaaatttactagatgtaattaaagacacaagaagtaaagaaattacttcagatacaatggaacagtccattcatgaaacaatacctttagtgagccaaaacataatgtgtcccactaaattggtcaaatctgcatttaagactgctcaggaaacaagcacaatgactatgaatgtcagccaggttgatgacgtggtttcctccaaaactcgtacgagaggtcaacgtatccaaaacgtgaatgtcaaatcagcacaacaggaagcatcagcagatgttgctactcctaagatgccagggcagtcagtcaggaagaaaactaggaaggcaaaagaaatttctgaagcttctgaaaacatctattctgatgtcagaggactatctcagaaccagcaaatacctcaaaattctgttacgcctaggagaggaaggagaaagaaagaagttaatcaggacatactagaaaacaccagttctgtggaacaagaattacagatcactacaggtagggaatcaaaaagattaaaatcatctcagctgttggaaccagcagttgaagaaactactaaaaaagaagttaaggtttcatctgttacaaaaaggactcctagaagaattaaaagatctgtagaaaatcaggaaagtgttgaaattataaatgatctaaaagttagtacggtaacaagtcctagcagaatgatcagaaaattgagaagtactaatttagatgcttctgaaaatacaggaaataagcaagatgataaatccagtgacaagcagctgcgtattaaacatgttagaagggtcagagggagagaagttagtccatcagatgtgagagaagactccaaccttgagtcatctcagttgactgttcaagcagaatttgatatgtctgccatacctagaaaacgtggtagaccaagaaaaatcaatccatctgaagatgtaggatctaaggctgttaaggaagagagaagccccaagaagaaagaagctcccagcattagaaggagatctacaagaaataccccagctaaaagtgaaaatgttgatgttggaaaaccagctttaggaaaatccattttagtgccaaacgaggaactttcgatggtgatgagctctaagaaaaaacttacaaaaaagactgaaagtcaaagccaaaaacgttcattgcactcagtatcagaagaacgcacagatgaaatgacacataaagaaacaaatgagcaggaagaaagattgctcgccacagcttccttcactaaatcatcccgcagcagcaggactcggtctagcaaggccatcttgttgccggacctttctgaaccaaacaatgagcctttattttctccagcgtcagaagttccaaggaaagcaaaagctaaaaaaatagaggttcctgcacagctgaaagaattagtttcggatttatcttctcagtttgtcatctcacctcctgctttaaggagcagacaaaaaaacacatccaataagaacaagcttgaagatgaactgaaagatgatgcacaatcagtagaaactctgggaaagccaaaagcgaaacgaatcaggacgtcaaaaacaaaacaagcaagcaaaaacacagaaaaagaaagtgcttggtcacctcctcccatagaaattcggctgatttcccccttggctagcccagctgacggagtcaagagcaaaccaagaaaaactacagaagtgacaggaacaggtcttggaaggaacagaaagaaactgtcttcctatccaaagcaaattttacgcagaaaaatgctgtaa

SEQ ID NO: 1018 - DNA, 957 bp, Homo sapiens
atgccgaagcgtgggaaaaagggagcggtggcggaagacggggatgagctcaggacagagccagaggccaagaagagtaagacggccgcaaagaaaaatgacaaagaggcagcaggagagggcccagccctgtatgaggaccccccagatcagaaaacctcacccagtggcaaacctgccacactcaagatctgctcttggaatgtggatgggcttcgagcctggattaagaagaaaggattagattgggtaaaggaagaagccccagatatactgtgccttcaagagaccaaatgttcagagaacaaactaccagctgaacttcaggagctgcctggactctctcatcaatactggtcagctccttcggacaaggaagggtacagtggcgtgggcctgctttcccgccagtgcccactcaaagtttcttacggcataggcgatgaggagcatgatcaggaaggccgggtgattgtggctgaatttgactcgtttgtgctggtaacagcatatgtacctaatgcaggccgaggtctggtacgactggagtaccggcagcgctgggatgaagcctttcgcaagttcctgaagggcctggcttcccgaaagccccttgtgctgtgtggagacctcaatgtggcacatgaagaaattgaccttcgcaaccccaaggggaacaaaaagaatgctggcttcacgccacaagagcgccaaggcttcggggaattactgcaggctgtgccactggctgacagctttaggcacctctaccccaacacaccctatgcctacaccttttggacttatatgatgaatgctcgatccaagaatgttggttggcgccttgattactttttgttgtcccactctctgttacctgcattgtgtgacagcaagatccgttccaaggccctcggcagtgatcactgtcctatcaccctatacctagcactgtga

SEQ ID NO: 1019 - DNA, 2412 bp, Homo sapiens
atgaagaagcagttcaaccgcatgaagcagctggctaaccagaccgtgggcagagctgagaaaacagaagtccttagtgaagatctattacagattgagagacgcctggacacggtgcggtcaatatgccaccattcccataagcgcttggtggcatgtttccagggccagcatggcaccgatgccgagaggagacacaaaaaactgcctctgacagctcttgctcaaaatatgcaagaagcatcgactcagctggaagactctctcctggggaagatgctggagacgtgtggagatgctgagaatcagctggctctcgagctctcccagcacgaagtctttgttgagaaggagatcgtggaccctctgtacggcatagctgaggtggagattcccaacatccagaagcagaggaagcagcttgcaagattggtgttagactgggattcagtcagagccaggtggaaccaagctcacaaatcctcaggaaccaactttcaggggcttccatcaaaaatagatactctaaaggaagagatggatgaagctggaaataaagtagaacagtgcaaggatcaacttgcagcagacatgtacaactttatggccaaagaaggggagtatggcaaattctttgttacgttattagaagcccaagcagattaccatagaaaagcattagcagtcttagaaaagaccctccccgaaatgcgagcccatcaagataagtgggcggaaaaaccagcctttgggactcccctagaagaacacctgaagaggagcgggcgcgagattgcgctgcccattgaagcctgtgtcatgctgcttctggagacaggcatgaaggaggagggccttttccgaattggggctggggcctccaagttaaagaagctgaaagctgctttggactgttctacttctcacctggatgagttctattcagacccccatgctgtagcaggtgctttaaaatcctatttacgggaattgcctgaacctttgatgacttttaatctgtatgaagaatggacacaagttgcaagtgtgcaggatcaagacaaaaaacttcaagacttgtggagaacatgtcagaagttgccaccacaaaattttgttaactttagatatttgatcaagttccttgcaaagcttgctcagaccagcgatgtgaataaaatgactcccagcaacattgcgattgtgttaggccctaacttgttatgggccagaaatgaaggaacacttgctgaaatggcagcagccacatccgtccatgtggttgcagtgattgaacccatcattcagcatgccgactggttcttccctgaagaggtggaatttaatgtatcagaagcatttgtacctctcaccaccccgagttctaatcactcattccacactggaaacgactctgactcggggaccctggagaggaagcggcctgctagcatggcggtgatggaaggagacttggtgaagaaggaaagtcctcccaaaccgaaggaccctgtatctgcagctgtgccagcaccagggagaaacaacagtcagatagcatctggccaaaatcagccccaggcagctgctggctcccaccagctctccatgggccaacctcacaatgctgcagggcccagcccgcatacactgcgccgagctgttaaaaaacccgctccagcacccccgaaaccgggcaacccacctcctggccaccccgggggccagagttcttcaggaacatctcagcatccacccagtctgtcaccaaagccacccacccgaagcccctctcctcccacccagcacacgggccagcctccaggccagccctccgccccctcccagctctcagcaccccggaggtactccagcagcttgtctccaatccaagctcccaatcacccaccgccgcagccccctacgcaggccacgccactgatgcacaccaaacccaatagccagggccctcccaaccccatggcattgcccagtgagcatggacttgagcagccatctcacacccctccccagactccaacgccccccagtactccgcccctaggaaaacagaaccccagtctgccagctcctcagaccctggcagggggtaaccctgaaactgcacagccacatgctggaaccttaccgagaccgagaccagtaccaaagccaaggaaccggcccagcgtgcccccacccccccaacctcctggtgtccactcagctggggacagcagcctcaccaacacagcaccaacagcttccaagatagtaacagactccaattccagggtttcagaaccgcatcgcagcatctttcctgaaatgcactcagactcagccagcaaagacgtgcctggccgcatcctgctggatatagacaatgataccgagagcactgccctgtga

SEQ ID NO: 1020 - DNA, 6858 bp, Homo sapiens
atggccgcgcaggtcgcccccgccgccgccagcagcctgggcaacccgccgccgccgccgccctcggagctgaagaaagccgagcagcagcagcgggaggaggcggggggcgaggcggcggcggcggcagcggccgagcgcggggaaatgaaggcagccgccgggcaggaaagcgagggccccgccgtggggccgccgcagccgctgggaaaggagctgcaggacggggccgagagcaatgggggtggcggcggcggcggagccggcagcggcggcgggcccggcgcggagccggacctgaagaactcgaacgggaacgcgggccctaggcccgccctgaacaataacctcacggagccgcccggcggcggcggtggcggcagcagcgatggggtgggggcgcctcctcactcagccgcggccgccttgccgcccccagcctacggcttcgggcaaccctacggccggagcccgtctgccgtcgccgccgccgcggccgccgtcttccaccaacaacatggcggacaacaaagccctggcctggcagcgctgcagagcggcggcggcgggggcctggagccctacgcggggccccagcagaactctcacgaccacggcttccccaaccaccagtacaactcctactaccccaaccgcagcgcctaccccccgcccgccccggcctacgcgctgagctccccgagaggtggcactccgggctccggcgcggcggcggctgccggctccaagccgcctccctcctccagcgcctccgcctcctcgtcgtcttcgtccttcgctcagcagcgcttcggggccatggggggaggcggcccctccgcggccggcgggggaactccccagcccaccgccacccccaccctcaaccaactgctcacgtcgcccagctcggcccggggctaccagggctaccccgggggcgactacagtggcgggccccaggacgggggcgccggcaagggcccggcggacatggcctcgcagtgttggggggctgcggcggcggcagctgcggcggcggccgcctcgggaggggcccaacaaaggagccaccacgcgcccatgagccccgggagcagcggcggcggggggcagccgctcgcccggacccctcagccatccagtccaatggatcagatgggcaagatgagacctcagccatatggcgggactaacccatactcgcagcaacagggacctccgtcaggaccgcagcaaggacatgggtacccagggcagccatacgggtcccagaccccgcagcggtacccgatgaccatgcagggccgggcgcagagtgccatgggcggcctctcttatacacagcagattcctccttatggacaacaaggccccagcgggtatggtcaacagggccagactccatattacaaccagcaaagtcctcaccctcagcagcagcagccaccctactcccagcaaccaccgtcccagacccctcatgcccaaccttcgtatcagcagcagccacagtctcaaccaccacagctccagtcctctcagcctccatactcccagcagccatcccagcctccacatcagcagtccccggctccatacccctcccagcagtcgacgacacagcagcacccccagagccagcccccctactcacagccacaggctcagtctccttaccagcagcagcaacctcagcagccagcaccctcgacgctctcccagcaggctgcgtatcctcagccccagtctcagcagtcccagcaaactgcctattcccagcagcgcttccctccaccgcaggagctatctcaagattcatttgggtctcaggcatcctcagccccctcaatgacctccagtaagggagggcaagaagatatgaacctgagccttcagtcaagaccctccagcttgcctgatctatctggttcaatagatgacctccccatggggacagaaggagctctgagtcctggagtgagcacatcagggatttccagcagccaaggagagcagagtaatccagctcagtctcctttctctcctcatacctcccctcacctgcctggcatccgaggcccttccccgtcccctgttggctctcccgccagtgttgctcagtctcgctcaggaccactctcgcctgctgcagtgccaggcaaccagatgccacctcggccacccagtggccagtcggacagcatcatgcatccttccatgaaccaatcaagcattgcccaagatcgaggttatatgcagaggaacccccagatgccccagtacagttccccccagcccggctcagccttatctccgcgtcagccttccggaggacagatacacacaggcatgggctcctaccagcagaactccatggggagctatggtccccaggggggtcagtatggcccacaaggtggctaccccaggcagccaaactataatgccttgcccaatgccaactaccccagtgcaggcatggctggaggcataaaccccatgggtgccggaggtcaaatgcatggacagcctggcatcccaccttatggcacactccctccagggaggatgagtcacgcctccatgggcaaccggccttatggccctaacatggccaatatgccacctcaggttgggtcagggatgtgtcccccaccagggggcatgaaccggaaaacccaagaaactgctgtcgccatgcatgttgctgccaactctatccaaaacaggccgccaggctaccccaatatgaatcaagggggcatgatgggaactggacctccttatggacaagggattaatagtatggctggcatgatcaaccctcagggacccccatattccatgggtggaaccatggccaacaattctgcagggatggcagccagcccagagatgatgggccttggggatgtaaagttaactccagccaccaaaatgaacaacaaggcagatgggacacccaagacagaatccaaatccaagaaatccagttcttctactacaaccaatgagaagatcaccaagttgtatgagctgggtggtgagcctgagaggaagatgtgggtggaccgttatctggccttcactgaggagaaggccatgggcatgacaaatctgcctgctgtgggtaggaaacctctggacctctatcgcctctatgtgtctgtgaaggagattggtggattgactcaggtcaacaagaacaaaaaatggcgggaacttgcaaccaacctcaatgtgggcacatcaagcagtgctgccagctccttgaaaaagcagtatatccagtgtctctatgcctttgaatgcaagattgaacggggagaagaccctcccccagacatctttgcagctgctgattccaagaagtcccagcccaagatccagcctccctctcctgcgggatcaggatctatgcaggggccccagactccccagtcaaccagcagttccatggcagaaggaggagacttaaagccaccaactccagcatccacaccacacagtcagatccccccattgccaggcatgagcaggagcaattcagttgggatccaggatgcctttaatgatggaagtgactccacattccagaagcggaattccatgactccaaaccctgggtatcagcccagtatgaatacctctgacatgatggggcgcatgtcctatgagccaaataaggatccttatggcagcatgaggaaagctccagggagtgatcccttcatgtcctcagggcagggccccaacggcgggatgggtgacccctacagtcgtgctgccggccctgggctaggaaatgtggcgatgggaccacgacagcactatccctatggaggtccttatgacagagtgaggacggagcctggaatagggcctgagggaaacatgagcactggggccccacagccgaatctcatgccttccaacccagactcggggatgtattctcctagccgctaccccccgcagcagcagcagcagcagcagcaacgacatgattcctatggcaatcagttctccacccaaggcaccccttctggcagccccttccccagccagcagactacaatgtatcaacagcaacagcagaattacaagcggccaatggatggcacatatggccctcctgccaagcggcacgaaggggagatgtacagcgtgccatacagcactgggcaggggcagcctcagcagcagcagttgcccccagcccagccccagcctgccagccagcaacaagctgcccagccttcccctcagcaagatgtatacaaccagtatggcaatgcctatcctgccactgccacagctgctactgagcgccgaccagcaggcggcccccagaaccaatttccattccagtttggccgagaccgtgtctctgcaccccctggcaccaatgcccagcaaaacatgccaccacaaatgatgggcggccccatacaggcatcagctgaggttgctcagcaaggcaccatgtggcaggggcgtaatgacatgacctataattatgccaacaggcagagcacgggctctgccccccagggccccgcctatcatggcgtgaaccgaacagatgaaatgctgcacacagatcagagggccaaccacgaaggctcgtggccttcccatggcacacgccagcccccatatggtccctctgcccctgtgccccccatgacaaggccccctccatctaactaccagcccccaccaagcatgcagaatcacattcctcaggtatccagccctgctcccctgccccggccaatggagaaccgcacctctcctagcaagtctccattcctgcactctgggatgaaaatgcagaaggcaggtcccccagtacctgcctcgcacatagcacctgcccctgtgcagccccccatgattcggcgggatatcaccttcccacctggctctgttgaagccacacagcctgtgttgaagcagaggaggcggctcacaatgaaagacattggaaccccggaggcatggcgggtaatgatgtccctcaagtctggtctcctggcagagagcacatgggcattagataccatcaacatcctgctgtatgatgacaacagcatcatgaccttcaacctcagtcagctcccagggttgctagagctccttgtagaatatttccgacgatgcctgattgagatctttggcattttaaaggagtatgaggtgggtgacccaggacagagaacgctactggatcctgggaggttcagcaaggtgtctagtccagctcccatggagggtggggaagaagaagaagaacttctaggtcctaaactagaagaggaagaagaagaggaagtagttgaaaatgatgaggagatagccttttcaggcaaggacaagccagcttcagagaatagtgaggagaagctgatcagtaagtttgacaagcttccagtaaagatcgtacagaagaatgatccatttgtggtggactgctcagataagcttgggcgtgtgcaggagtttgacagtggcctgctgcactggcggattggtgggggggacaccactgagcatatccagacccacttcgagagcaagacagagctgctgccttcccggcctcacgcaccctgcccaccagcccctcggaagcatgtgacaacagcagagggtacaccagggacaacagaccaggaggggcccccacctgatggacctccagaaaaacggatcacagccactatggatgacatgttgtctactcggtctagcaccttgaccgaggatggagctaagagttcagaggccatcaaggagagcagcaagtttccatttggcattagcccagcacagagccaccggaacatcaagatcctagaggacgaaccccacagtaaggatgagaccccactgtgtacccttctggactggcaggattctcttgccaagcgctgcgtctgtgtgtccaataccattcgaagcctgtcatttgtgccaggcaatgactttgagatgtccaaacacccagggctgctgctcatcctgggcaagctgatcctgctgcaccacaagcacccagaacggaagcaggcaccactaacttatgaaaaggaggaggaacaggaccaaggggtgagctgcaacaaagtggagtggtggtgggactgcttggagatgctccgggaaaacaccttggttacactcgccaacatctcggggcagttggacctatctccataccccgagagcatttgcctgcctgtcctggacggactcctacactgggcagtttgcccttcagctgaagcccaggaccccttttccaccctgggccccaatgccgtcctttccccgcagagactggtcttggaaaccctcagcaaactcagcatccaggacaacaatgtggacctgattctggccacaccccccttcagccgcctggagaagttgtatagcactatggtgcgcttcctcagtgaccgaaagaacccggtgtgccgggagatggctgtggtactgctggccaacctggctcagggggacagcctggcagctcgtgccattgcagtgcagaagggcagtatcggcaacctcctgggcttcctagaggacagccttgccgccacacagttccagcagagccaggccagcctcctccacatgcagaacccaccctttgagccaactagtgtggacatgatgcggcgggctgcccgcgcgctgcttgccttggccaaggtggacgagaaccactcagagtttactctgtacgaatcacggctgttggacatctcggtatcaccgttgatgaactcattggtttcacaagtcatttgtgatgtactgtttttgattggccagtcatga

SEQ ID NO: 1021 - DNA, 1482 bp, Homo sapiens
atgtcagtggacatgaatagccaggggtctgacagcaatgaagaggactatgacccaaattgtgaggaagaggaagaagaagaagaagacgaccctggggacatagaggactattacgtgggagtagccagcgatgtggagcagcagggggctgatgcctttgatcccgaggagtaccagttcacttgcttgacctacaaggaatctgagggtgccctcaatgagcacatgaccagcttagcttctgtcctaaaggtatctcattcagttgctaaacttatattagttaatttccactggcaagtttcagagatattggacagatacaagtccaattctgctcaactgcttgttgaggctcgagttcagcctaatccatcaaaacatgttcccacatcccatccccctcaccactgtgcagtgtgtatgcagtttgtgcgaaaggaaaacctactctctctggcctgtcagcaccagttttgccgcagctgctgggagcagcactgctcagttctcgtcaaggacggcgtgggcgtgggagtctcttgcatggctcaggactgtccactccgtacaccagaggactttgtgtttccattgcttcccaatgaagaattgagagagaaatacaggcgctacctcttcagggactatgtggagagtcattaccagctccagctgtgccctggtgcagactgccccatggttattcgggtacaggagcctagagctcgccgagtacagtgcaatcggtgcaacgaggtcttctgtttcaagtgtcgtcagatgtatcacgcacccacagactgtgccacaatccggaaatggctcacgaagtgtgcagacgactctgaaacagccaactacattagtgctcacactaaagactgtcccaagtgcaacatctgcattgagaagaatggaggctgcaatcacatgcaatgctccaaatgtaaacacgacttctgctggatgtgtctaggagattggaagactcatggcagtgaatactatgagtgcagtcgttacaaggagaatcctgacatcgtgaaccagagccaacaagcccaggcgagggaagccctcaagaagtacttattctactttgagaggtgggaaaaccacaataaaagcttgcagctagaggcacagacataccagcggattcacgagaagattcaggagagggtcatgaacaatctggggacatggatcgactggcagtacctacagaatgctgccaagctcttggccaagtgtcgatacaccctgcaatacacctacccatatgcatattacatggagtccggacccaggaagaagctgtttgaataccagcaggctcagctggaggctgagatcgaaaacctctcatggaaagtggagcgtgcagacagctatgacagaggggacttggagaaccagatgcatatagcggagcagcggaggagaaccctgctgaaagatttccatgacacctaa

SEQ ID NO: 1022 - DNA, 4308 bp, Homo sapiens
atgagggaaaagggacgtaggaagaagggcaggacctgggcggaggccgccaagacggtcttagaaaaataccccaatacacccatgagtcataaagaaattcttcaagttatccagagagaaggactaaaagaaatcagaagtgggacttctcctcttgcatgcctgaatgcaatgcttcacacaaactccagaggtgaagagggcatcttctataaggttccaggtagaatgggagtatatactttgaagaaagatgtgccggatggggtgaaagagctgtcagaaggttcagaagaaagcagtgatggtcagtcagattcccagagttctgagaacagcagcagcagcagtgatggtggcagcaacaaggagggaaaaaagagcaggtggaaaaggaaagtatcgtcgtcctccccgcagtcaggctgcccatcacccaccattccagcaggtaaagtcatttctccatcacagaagcacagcaagaaggcactaaagcaggcgctaaagcagcaacagcagaagaagcagcagcagcaatgcaggccaagcatatccatctcctccaaccagcatctctcactaaagactgtcaaagcagccagtgactctgtacctgccaaacctgcaacatgggaaggaaagcaatctgatggacagacaggcagccctcaaaactcaaactccagcttttcttcctcagttaaagtggaaaatactttactaggcttggggaagaagtcattccagagatctgagagactccataccagacaaatgaaaagaactaaatgtgctgacattgacgttgagacaccggactccattctggttaatacaaatctgcgagcactgatcaacaagcacacattttcagtccttcctggagattgccagcaacgactgcttttactactcccagaggtagatcgacaggttggtccagatggtttaatgaagttaaatggctcagcccttaacaatgaattcttcacttcagcagcccaaggctggaaggaaagactctcagaaggtgagtttacacctgagatgcaggtgagaattcgacaagagattgagaaggagaaaaaagtggagccatggaaagaacaattctttgaaagctactatgggcagagttctggcctgagccttgaagattctaagaaattgacagcttctcccagtgatcccaaagtaaagaaaaccccagctgaacaaccaaaatccatgcctgtgtcagaggcctctcttatcagaatagttccagtagtctcccagtcagagtgtaaagaagaagcattgcaaatgtcatcaccaggcagaaaagaagagtgtgaaagccaaggtgaagtgcagccgaacttctccacatcttcagagcccctgctttcctcagctctcaatacacatgagcttagcagcattcttcccatcaagtgcccaaaggatgaggatctcttggagcagaagccagtcacctctgctgaacaggaatctgagaagaaccatctcaccacagcttctaattataacaaaagtgaaagccaagaatctttagttacatcgccaagcaaacccaagagtcctggggttgaaaaaccaatagtgaagcccacagcaggagcgggtccacaggagactaatatgaaagaacctctagcaactcttgttgatcagagcccagaaagcctcaagaggaagtcttccctcacccaagaagaggcccctgtgagctgggagaagaggccacgtgtcactgagaatcgccagcaccagcagccatttcaggtctcaccacagccctttctcaatagaggggacagaatccaggtgcgaaaagtaccacctctcaagatcccggtctccagaatctcccccatgccgtttcatccatcgcaggtctctcccagggctcgttttccagtctccatcactagtcctaacagaacaggagccagaactcttgcagacatcaaagcaaaagcccaactggtcaaagcacagagggcagcagctgccgctgccgccgcagctgctgcagccgcctcagttggagggaccattccaggacctggcccagggggtggacaaggtccaggagagggtggtgaagggcagactgctagaggaggcagtccaggctcagacagagtcagtgaaactggaaagggccccacactggaactggcaggaactggaagcaggggaggtacgagagagcttttaccctgtggtccagagactcagccccagtctgagaccaagaccaccccaagccaggcacagcctcatagtgtctctggagcacaactacagcaaacccccccagtgcctccaacacctgccgtcagtggagcatgcacaagtgtcccatcaccagcccacatagagaaattggataatgaaaaactgaaccccaccagagcaacagccacagtggcctctgtcagccatccacaagggcccagtagttgcagacaggagaaagcaccttctccaacaggtcctgctctaatctcaggtgcctcacctgttcattgtgcagctgatggcacagttgagctcaaagcaggtcctagtaagaatatacctaacccttcagcctcatcaaagacagatgctagtgtgccagtggctgtaactccctcccctttaacatctttattgaccacagccactttagaaaagcttcctgtaccccaggtcagtgcaactacagcacctgctggatcagctccaccctcgagcactttgccagcagcttctagccttaaaaccccaggaacttctttaaacatgaatggacccactttaagaccaacctctagtatccctgctaataatcctttagtgactcagctgcttcaaggcaaagatgttcccatggagcaaattctgcctaaacctctcaccaaagttgaaatgaaaacggttccactgactgcaaaagaggaaagggggatgggagcgctcatagctaccaacacaacagaaaatagcaccagagaggaagttaatgagagacagtcccatccagctacgcagcagcagctgggcaaaaccttgcaaagtaagcagctcccccaggttccaaggccccttcagctcttttcagctaaggagctgagggactccagcattgacacacaccaataccacgaaggactaagtaaagcaacccaagatcagatccttcagactctcattcagagggttcggaggcagaatcttctctcagttgtgccgccctcacagttcaacttcgctcactcaggtttccagctggaagacatctccacaagccagaggttcatgctgggttttgctggcagaaggacatccaaacctgcaatggcagggcactacttactgaatatttctacctacggccggggctcagagagctttaggaggacccattctgtaaaccctgaagatcgtttttgtctaagcagccccactgaagccttgaaaatgggatatacagactgtaaaaatgcaacaggagagagtagcagcagcaaagaagatgacactgatgaggaaagtactggtgatgagcaggaatctgtcacagtgaaagaggagccccaggtttcccagagtgctggcaagggtgacacaagttcaggacctcacagcagggaaactctatctaccagtgattgcttagctagcaagaatgtgaaggctgagataccattgaatgagcaaaccactttaagtaaggagaattacctgttcactagaggccaaacatttgatgaaaagaccctagccagagatttaattcaggcagcacagaagcagatggctcatgcagtgagaggtaaggcaatccgtagcagccccgagcttttcagttctactgttcttcctctgcctgcagacagccccacccaccagcccctactccttccacccctgcaaaccccgaagttgtatggaagccccacccagatagggccaagctatagaggcatgatcaatgtctccacctcatctgacatggaccataactctgctgtaccaggtagccaggtatctagcaatgtaggtgatgtcatgtcattttcagtgactgtcactaccatccctgctagccaagctatgaatcccagcagccatggccagaccattcctgttcaggcgttctccgaagagaacagcatagagggcacgccttcgaaatgttactgccgcttgaaagccatgatcatgtgcaaaggctgtggcgctttctgccatgatgattgcatcggcccctccaaactgtgcgtctcctgccttgtcgttcggtaa

SEQ ID NO: 1023 - DNA, 207 bp, Homo sapiens
atgccgaagcacgagttctctgtggacatgacctgtggaggctgtgctgaagctgtctctcgggtcctcaataagcttggaggagttaagtatgacattgacctgcccaacaagaaggtctgcattgaatctgagcacagcatggacactctgcttgcaaccctgaagaaaacaggaaagactgtttcctaccttggccttgagtag

SEQ ID NO: 1024 - DNA, 2994 bp, Homo sapiens
atggagaacgcgcacaccaagacggtggaggaggtgctgggccacttcggcgtcaacgagagtacggggctgagcctggaacaggtcaagaagcttaaggagagatggggctccaacgagttaccggctgaagaaggaaaaaccttgctggaacttgtgattgagcagtttgaagacttgctagttaggattttattactggcagcatgtatatcttttgttttggcttggtttgaagaaggtgaagaaacaattacagcctttgtagaaccttttgtaattttactcatattagtagccaatgcaattgtgggtgtatggcaggaaagaaatgctgaaaatgccatcgaagcccttaaggaatatgagcctgaaatgggcaaagtgtatcgacaggacagaaagagtgtgcagcggattaaagctaaagacatagttcctggtgatattgtagaaattgctgttggtgacaaagttcctgctgatataaggttaacttccatcaaatctaccacactaagagttgaccagtcaattctcacaggtgaatctgtctctgtcatcaagcacactgatcccgtccctgacccacgagctgtcaaccaagataaaaagaacatgctgttttctggtacaaacattgctgctgggaaagctatgggagtggtggtagcaactggagttaacaccgaaattggcaagatccgggatgaaatggtggcaacagaacaggagagaacaccccttcagcaaaaactagatgaatttggggaacagctttccaaagtcatctcccttatttgcattgcagtctggatcataaatattgggcacttcaatgacccggttcatggagggtcctggatcagaggtgctatttactactttaaaattgcagtggccctggctgtagcagccattcctgaaggtctgcctgcagtcatcaccacctgcctggctcttggaactcgcagaatggcaaagaaaaatgccattgttcgaagcctcccgtctgtggaaacccttggttgtacttctgttatctgctcagacaagactggtacacttacaacaaaccagatgtcagtctgcaggatgttcattctggacagagtggaaggtgatacttgttcccttaatgagtttaccataactggatcaacttatgcacctattggagaagtgcataaagatgataaaccagtgaattgtcaccagtatgatggtctggtagaattagcaacaatttgtgctctttgtaatgactctgctttggattacaatgaggcaaagggtgtgtatgaaaaagttggagaagctacagagactgctctcacttgcctagtagagaagatgaatgtatttgataccgaattgaagggtctttctaaaatagaacgtgcaaatgcctgcaactcagtcattaaacagctgatgaaaaaggaattcactctagagttttcacgtgacagaaagtcaatgtcggtttactgtacaccaaataaaccaagcaggacatcaatgagcaagatgtttgtgaagggtgctcctgaaggtgtcattgacaggtgcacccacattcgagttggaagtactaaggttcctatgacctctggagtcaaacagaagatcatgtctgtcattcgagagtggggtagtggcagcgacacactgcgatgcctggccctggccactcatgacaacccactgagaagagaagaaatgcaccttgaggactctgccaactttattaaatatgagaccaatctgaccttcgttggctgcgtgggcatgctggatcctccgagaatcgaggtggcctcctccgtgaagctgtgccggcaagcaggcatccgggtcatcatgatcactggggacaacaagggcactgctgtggccatctgtcgccgcatcggcatcttcgggcaggatgaggacgtgacgtcaaaagctttcacaggccgggagtttgatgaactcaacccctccgcccagcgagacgcctgcctgaacgcccgctgttttgctcgagttgaaccctcccacaagtctaaaatcgtagaatttcttcagtcttttgatgagattacagctatgactggcgatggcgtgaacgatgctcctgctctgaagaaagccgagattggcattgctatgggctctggcactgcggtggctaaaaccgcctctgagatggtcctggcggatgacaacttctccaccattgtggctgccgttgaggaggggcgggcaatctacaacaacatgaaacagttcatccgctacctcatctcgtccaacgtcggggaagttgtctgtattttcctgacagcagcccttggatttcccgaggctttgattcctgttcagctgctctgggtcaatctggtgacagatggcctgcctgccactgcactggggttcaaccctcctgatctggacatcatgaataaacctccccggaacccaaaggaaccattgatcagcgggtggctctttttccgttacttggctattggctgttacgtcggcgctgctaccgtgggtgctgctgcatggtggttcattgctgctgacggtggtccaagagtgtccttctaccagctgagtcatttcctacagtgtaaagaggacaacccggactttgaaggcgtggattgtgcaatctttgaatccccatacccgatgacaatggcgctctctgttctagtaactatagaaatgtgtaacgccctcaacagcttgtccgaaaaccagtccttgctgaggatgcccccctgggagaacatctggctcgtgggctccatctgcctgtccatgtcactccacttcctgatcctctatgtcgaacccttgccactcatcttccagatcacaccgctgaacgtgacccagtggctgatggtgctgaaaatctccttgcccgtgattctcatggatgagacgctcaagtttgtggcccgcaactacctggaacctgcaatactggagtaa

SEQ ID NO: 1025 - DNA, 1536 bp, Homo sapiens; identical to SEQ ID NO: 213

SEQ ID NO: 1026 - DNA, 2322 bp, Homo sapiens
atgtctcgccgcaagcaaggcaaaccccagcacttaagcaaacgggaattctcgcccgagcctcttgaagccattcttacagatgatgaaccagaccacggcccgttgggagctccagaaggggatcatgacctcctcacctgtgggcagtgccagatgaacttcccattgggggacattcttatttttatcgagcacaaacggaaacaatgcaatggcagcctctgcttagaaaaagctgtggataagccaccttccccttcaccaatcgagatgaaaaaagcatccaatcccgtggaggttggcatccaggtcacgccagaggatgacgattgtttatcaacgtcatctagaggaatttgccccaaacaggaacacatagcagataaacttctgcactggaggggcctctcctcccctcgttctgcacatggagctctaatccccacgcctgggatgagtgcagaatatgccccgcagggtatttgtaaagatgagcccagcagctacacatgtacaacttgcaaacagccattcaccagtgcatggtttctcttgcaacacgcacagaacactcatggattaagaatctacttagaaagcgaacacggaagtcccctgaccccgcgggttggtatcccttcaggactaggtgcagaatgtccttcccagccacctctccatgggattcatattgcagacaataacccctttaacctgctaagaataccaggatcagtatcgagagaggcttccggcctggcagaagggcgctttccacccactccccccctgtttagtccaccaccgagacatcacttggacccccaccgcatagagcgcctgggggcggaagagatggccctggccacccatcacccgagtgcctttgacagggtgctgcggttgaatccaatggctatggagcctcccgccatggatttctctaggagacttagagagctggcagggaacacgtctagcccaccgctgtccccaggccggcccagccctatgcaaaggttactgcaaccattccagccaggtagcaagccgcccttcctggcgacgccccccctccctcctctgcaatccgcccctcctccctcccagcccccggtcaagtccaagtcatgcgagttctgcggcaagacgttcaaatttcagagcaacctggtggtgcaccggcgcagccacacgggcgagaagccctacaagtgcaacctgtgcgaccacgcgtgcacccaggccagcaagctgaagcgccacatgaagacgcacatgcacaaatcgtcccccatgacggtcaagtccgacgacggtctctccaccgccagctccccggaacccggcaccagcgacttggtgggcagcgccagcagcgcgctcaagtccgtggtggccaagttcaagagcgagaacgaccccaacctgatcccggagaacggggacgaggaggaagaggaggacgacgaggaagaggaagaagaggaggaagaggaggaggaggagctgacggagagcgagagggtggactacggcttcgggctgagcctggaggcggcgcgccaccacgagaacagctcgcggggcgcggtcgtgggcgtgggcgacgagagccgcgccctgcccgacgtcatgcagggcatggtgctcagctccatgcagcacttcagcgaggccttccaccaggtcctgggcgagaagcataagcgcggccacctggccgaggccgagggccacagggacacttgcgacgaagactcggtggccggcgagtcggaccgcatagacgatggcactgttaatggccgcggctgctccccgggcgagtcggcctcggggggcctgtccaaaaagctgctgctgggcagccccagctcgctgagccccttctctaagcgcatcaagctcgagaaggagttcgacctgcccccggccgcgatgcccaacacggagaacgtgtactcgcagtggctcgccggctacgcggcctccaggcagctcaaagatcccttccttagcttcggagactccagacaatcgccttttgcctcctcgtcggagcactcctcggagaacgggagtttgcgcttctccacaccgcccggggagctggacggagggatctcggggcgcagcggcacgggaagtggagggagcacgccccatattagtggtccgggcccgggcaggcccagctcaaaagagggcagacgcagcgacacttgttcttcacacacccccattcggcgtagtacccagagagctcaagatgtgtggcagttttcggatggaagctcgagagcccttaagttctga

SEQ ID NO: 1027 - DNA, 1365 bp, Homo sapiens
atgccccgatgccccgcgggggccatggacgaggggcccgtggacctgcgcacccggcccaaggccgccggactcccgggcgccgcgctgccgctccgcaagcgcccgctgcgcgcgccctccccggagcccgccgctccccgcggcgctgcgggccttgtcgtccccctggaccctctgcgcggcggctgcgacctgccggcggtccccgggcccccccacggcctggcccggccggaggcgctttactaccccggagccttactgcctttgtaccccactcgggccatgggctccccgtttcctctggtgaacctgcctacacccctataccccatgatgtgccccatggaacaccccctttctgctgacatcgccatggccacccgtgcagatgaggacggagacacgcctctccatattgctgtggtgcagggtaacctgccagctgtgcaccggctggtcaacctcttccagcaggggggccgggagctcgacatctacaacaacctacggcagacaccgctccacctggctgtgatcaccacattaccgtctgtggtccggctcctggtgacagctggtgccagccccatggcgctggaccgccatggccagacggccgctcacctggcgtgcgagcaccgcagcccgacctgcctgcgagccctgctggacagcgcagctccgggcacgttggacctggaggcccgcaattatgacgggctcaccgccctgcacgtggcagtgaacaccgagtgccaagaaaccgtgcagctcttgctagagcgcggtgccgacatcgacgcagtggacattaagagcggccgctccccgctcatccacgccgtggaaaacaacagccttagcatggtgcagctgctgctgcagcacggcgccaacgtgaacgcgcaaatgtactccggcagctccgccctgcactcagcgtccggccgcgggctcctcccgctggtgcgcacgctggtccgcagcggcgctgacagcagcctcaagaactgccacaacgacacgccgctcatggtggcgcgcagccgcagggtcatcgacatcctgagggggaaggccacccggcctgcttccacctcccagccagacccctcccctgaccggagcgccaacacctcccccgagagcagcagccgcctcagctccaatggtcttctctccgcatcaccatcctcctcaccctcccagtctccccccagggacccccctggattccccatggctcctcccaatttcttccttccttccccatctccacccgccttcctgccctttgctggggtcctccgaggccctggccggccggtgcccccctccccagctccaggaggcagctga

SEQ ID NO: 1028 - DNA, 2121 bp, Homo sapiens
atggcctcgccggctgacagctgtatccagttcacccgccatgccagtgatgttcttctcaaccttaatcgtctccggagtcgagacatcttgactgatgttgtcattgttgtgagccgtgagcagtttagagcccataaaacggtcctcatggcctgcagtggcctgttctatagcatctttacagaccagttgaaatgcaaccttagtgtgatcaatctagatcctgagatcaaccctgagggattctgcatcctcctggacttcatgtacacatctcggctcaatttgcgggagggcaacatcatggctgtgatggccacggctatgtacctgcagatggagcatgttgtggacacttgccggaagtttattaaggccagtgaagcagagatggtttctgccatcaagcctcctcgtgaagagttcctcaacagccggatgctgatgccccaagacatcatggcctatcggggtcgtgaggtggtggagaacaacctgccactgaggagcgcccctgggtgtgagagcagagcctttgcccccagcctgtacagtggcctgtccacaccgccagcctcttattccatgtacagccacctccctgtcagcagcctcctcttctccgatgaggagtttcgggatgtccggatgcctgtggccaaccccttccccaaggagcgggcactcccatgtgatagtgccaggccagtccctggtgagtacagccggccgactttggaggtgtcccccaatgtgtgccacagcaatatctattcacccaaggaaacaatcccagaagaggcacgaagtgatatgcactacagtgtggctgagggcctcaaacctgctgccccctcagcccgaaatgccccctacttcccttgtgacaaggccagcaaagaagaagagagaccctcctcggaagatgagattgccctgcatttcgagccccccaatgcacccctgaaccggaagggtctggttagtccacagagcccccagaaatctgactgccagcccaactcgcccacagagtcctgcagcagtaagaatgcctgcatcctccaggcttctggctcccctccagccaagagccccactgaccccaaagcctgcaactggaagaaatacaagttcatcgtgctcaacagcctcaaccagaatgccaaaccagaggggcctgagcaggctgagctgggccgcctttccccacgagcctacacggccccacctgcctgccagccacccatggagcctgagaaccttgacctccagtccccaaccaagctgagtgccagcggggaggactccaccatcccacaagccagccggctcaataacatcgttaacaggtccatgacgggctctccccgcagcagcagcgagagccactcaccactctacatgcaccccccgaagtgcacgtcctgcggctctcagtccccacagcatgcagagatgtgcctccacaccgctggccccacgttccctgaggagatgggagagacccagtctgagtactcagattctagctgtgagaacggggccttcttctgcaatgagtgtgactgccgcttctctgaggaggcctcactcaagaggcacacgctgcagacccacagtgacaaaccctacaagtgtgaccgctgccaggcctccttccgctacaagggcaacctcgccagccacaagaccgtccataccggtgagaaaccctatcgttgcaacatctgtggggcccagttcaaccggccagccaacctgaaaacccacactcgaattcactctggagagaagccctacaaatgcgaaacctgcggagccagatttgtacaggtggcccacctccgtgcccatgtgcttatccacactggtgagaagccctatccctgtgaaatctgtggcacccgtttccggcaccttcagactctgaagagccacctgcgaatccacacaggagagaaaccttaccattgtgagaagtgtaacctgcatttccgtcacaaaagccagctgcgacttcacttgcgccagaagcatggcgccatcaccaacaccaaggtgcaataccgcgtgtcagccactgacctgcctccggagctccccaaagcctgctga

SEQ ID NO: 1029 - DNA, 1449 bp, Homo sapiens
atggcgtctttctctgctgagaccaattcaactgacctactctcacagccatggaatgagcccccagtaattctctccatggtcattctcagccttacttttttactgggattgccaggcaatgggctggtgctgtgggtggctggcctgaagatgcagcggacagtgaacacaatttggttcctccacctcaccttggcggacctcctctgctgcctctccttgcccttctcgctggctcacttggctctccagggacagtggccctacggcaggttcctatgcaagctcatcccctccatcattgtcctcaacatgtttgccagtgtcttcctgcttactgccattagcctggatcgctgtcttgtggtattcaagccaatctggtgtcagaatcatcgcaatgtagggatggcctgctctatctgtggatgtatctgggtggtggcttttgtgatgtgcattcctgtgttcgtgtaccgggaaatcttcactacagacaaccataatagatgtggctacaaatttggtctctccagctcattagattatccagacttttatggagatccactagaaaacaggtctcttgaaaacattgttcagccgcctggagaaatgaatgataggttagatccttcctctttccaaacaaatgatcatccttggacagtccccactgtcttccaacctcaaacatttcaaagaccttctgcagattcactccctaggggttctgctaggttaacaagtcaaaatctgtattctaatgtatttaaacctgctgatgtggtctcacctaaaatccccagtgggtttcctattgaagatcacgaaaccagcccactggataactctgatgcttttctctctactcatttaaagctgttccctagcgcttctagcaattccttctacgagtctgagctaccacaaggtttccaggattattacaatttaggccaattcacagatgacgatcaagtgccaacacccctcgtggcaataacgatcactaggctagtggtgggtttcctgctgccctctgttatcatgatagcctgttacagcttcattgtcttccgaatgcaaaggggccgcttcgccaagtctcagagcaaaacctttcgagtggccgtggtggtggtggctgtctttcttgtctgctggactccataccacatttttggagtcctgtcattgcttactgacccagaaactcccttggggaaaactctgatgtcctgggatcatgtatgcattgctctagcatctgccaatagttgctttaatcccttcctttatgccctcttggggaaagattttaggaagaaagcaaggcagtccattcagggaattctggaggcagccttcagtgaggagctcacacgttccacccactgtccctcaaacaatgtcatttcagaaagaaatagtacaactgtgtga

SEQ ID NO: 1030 - DNA, 1488 bp, Homo sapiens; identical to SEQ ID NO: 226

SEQ ID NO: 1031 - DNA, 879 bp, Homo sapiens; identical to SEQ ID NO: 231

SEQ ID NO: 1032 - DNA, 1137 bp, Homo sapiens; identical to SEQ ID NO: 234

SEQ ID NO: 1033 - DNA, 186 bp, Homo sapiens
atgaagcgcttcctcttcctcctactcaccatcagcctcctggttatggtacagatacaaactggactctcaggacaaaacgacaccagccaaaccagcagcccctcagcatccagcaacataagcggaggcattttccttttcttcgtggccaatgccataatccacctcttctgcttcagttga

SEQ ID NO: 1034 - DNA, 1146 bp, Homo sapiens
atgaccgtcgcgcggccgagcgtgcccgcggcgctgcccctcctcggggagctgccccggctgctgctgctggtgctgttgtgcctgccggccgtgtggggtgactgtggccttcccccagatgtacctaatgcccagccagctttggaaggccgtacaagttttcccgaggatactgtaataacgtacaaatgtgaagaaagctttgtgaaaattcctggcgagaaggactcagtgatctgccttaagggcagtcaatggtcagatattgaagagttctgcaatcgtagctgcgaggtgccaacaaggctaaattctgcatccctcaaacagccttatatcactcagaattattttccagtcggtactgttgtggaatatgagtgccgtccaggttacagaagagaaccttctctatcaccaaaactaacttgccttcagaatttaaaatggtccacagcagtcgaattttgtaaaaagaaatcatgccctaatccgggagaaatacgaaatggtcagattgatgtaccaggtggcatattatttggtgcaaccatctccttctcatgtaacacagggtacaaattatttggctcgacttctagtttttgtcttatttcaggcagctctgtccagtggagtgacccgttgccagagtgcagagaaatttattgtccagcaccaccacaaattgacaatggaataattcaaggggaacgtgaccattatggatatagacagtctgtaacgtatgcatgtaataaaggattcaccatgattggagagcactctatttattgtactgtgaataatgatgaaggagagtggagtggcccaccacctgaatgcagaggaaaatctctaacttccaaggtcccaccaacagttcagaaacctaccacagtaaatgttccaactacagaagtctcaccaacttctcagaaaaccaccacaaaaaccaccacaccaaatgctcaagcaacacggagtacacctgtttccaggacaaccaagcattttcatgaaacaaccccaaataaaggaagtggaaccacttcaggtactacccgtcttctatctgggcacacgtgtttcacgttgacaggtttgcttgggacgctagtaaccatgggcttgctgacttag

SEQ ID NO: 1035 - DNA, 717 bp, Homo sapiens
atggcggtggaaggaggaatgaaatgtgtgaagttcttgctctacgtcctcctgctggccttttgcgcctgtgcagtgggactgattgccgtgggtgtcggggcacagcttgtcctgagtcagaccataatccagggggctacccctggctctctgttgccagtggtcatcatcgcagtgggtgtcttcctcttcctggtggcttttgtgggctgctgcggggcctgcaaggagaactattgtcttatgatcacgtttgccatctttctgtctcttatcatgttggtggaggtggccgcagccattgctggctatgtgtttagagataaggtgatgtcagagtttaataacaacttccggcagcagatggagaattacccgaaaaacaaccacactgcttcgatcctggacaggatgcaggcagattttaagtgctgtggggctgctaactacacagattgggagaaaatcccttccatgtcgaagaaccgagtccccgactcctgctgcattaatgttactgtgggctgtgggattaatttcaacgagaaggcgatccataaggagggctgtgtggagaagattgggggctggctgaggaaaaatgtgctggtggtagctgcagcagcccttggaattgcttttgtcgaggttttgggaattgtctttgcctgctgcctcgtgaagagtatcagaagtggctacgaggtgatgtag

SEQ ID NO: 1036 - DNA, 1038 bp, Homo sapiens
atgcaacgcctggtggcctgggacccagcatgtctccccctgccgccgccgccgcctgcctttaaatccatggaagtggccaacttctactacgaggcggactgcttggctgctgcgtacggcggcaaggcggcccccgcggcgccccccgcggccagacccgggccgcgcccccccgccggcgagctgggcagcatcggcgaccacgagcgcgccatcgacttcagcccgtacctggagccgctgggcgcgccgcaggccccggcgcccgccacggccacggacaccttcgaggcggctccgcccgcgcccgcccccgcgcccgcctcctccgggcagcaccacgacttcctctccgacctcttctccgacgactacgggggcaagaactgcaagaagccggccgagtacggctacgtgagcctggggcgcctgggggccgccaagggcgcgctgcaccccggctgcttcgcgcccctgcacccaccgcccccgccgccgccgccgcccgccgagctcaaggcggagccgggcttcgagcccgcggactgcaagcggaaggaggaggccggggcgccgggcggcggcgcaggcatggcggcgggcttcccgtacgcgctgcgcgcttacctcggctaccaggcggtgccgagcggcagcagcgggagcctctccacgtcctcctcgtccagcccgcccggcacgccgagccccgctgacgccaaggcgcccccgaccgcctgctacgcgggggccgcgccggcgccctcgcaggtcaagagcaaggccaagaagaccgtggacaagcacagcgacgagtacaagatccggcgcgagcgcaacaacatcgccgtgcgcaagagccgcgacaaggccaagatgcgcaacctggagacgcagcacaaggtcctggagctcacggccgagaacgagcggctgcagaagaaggtggagcagctgtcgcgcgagctcagcaccctgcggaacttgttcaagcagctgcccgagcccctgctcgcctcctccggccactgctag

SEQ ID NO: 1037 - DNA, 7614 bp, Homo sapiens
atggaagattttcgaggtatagcagaagaatcatttccaagctttctcaccaattcattatttggtaacagtgggattttggaaaatgtcactctttcttcaaatcttggcttgcctgttgctgtttctacacttgctagggatagatccagcactgataacaggtatcctgatatccaggcatcttacttagtagaagggagattttcagttccatccgggtcatctcccggaagccagagtgatgctgaaccaagagagaggttacagcttagcttccaggatgatgattctatctctaggaaaaagagctatgtggaaagtcaacgtttgtcaaatgctctcagcaaacagtcagctttacaaatggagacagcaggaccagaagaggagccagccggagctacagaatccttgcagggccaagatctcttcaacagggcttcaccactggaacaagcacaagactcacctattgattttcatttacagtcatggatgaataataaggaacccaagattgttgtgcttgatgctggaaaacattttgaagacaagactctaaagagtgacctaagccacactagcttattagaaaatgagaaacttatcttaccgacaagcttggaagattcttctgatgatgatattgatgatgaaatgttttatgatgatcatttggaggcttattttgaacaactggcaattccaggaatgatatatgaagacctagaaggaccagaacctccagaaaaaggttttaagttacctacaaatggtcttagacaggcaaatgaaaacggtagcttaaactgcaagtttcaatcagaaaataacagctctctgatttccctcgactcacactcttctgaaacaactcacaaagagtctgaggaaagccaagttatttgtctacctgggactagtaattctataggtactggagatagtagaaggtacacagatggtatgttaccattttcctctggtacttggggaactgagaaagaaatagaaaatttgaagggtattgttccagatcttaacagtgaatgtgcaagtaaagatgttctggtgaagaccctcagggctattgatgtgaaacttaactctgataattttcatgatgcaaatgccaatagaggtggttttgatctgactgaccctgtaaaacagggggcagagtgtcctcaccaaaataagacagttttgcacatggatggatgtttagacactgagactcctacggtgtccattcaagaaaatgtggatgtagcctctttgaagcccattagtgacagtggaattaatttcactgatgccatttggtcaccaacttgtgaaaggcgaacatgtgaatgtcacgagtccatcgaaaagaataaagacaaaacagatctcccacagagtgtggtctatcaaaatgaagagggtaggtgggtcacagaccttgcctattacacatcttttaatagcaaacaaaatttaaatgtgtctctaagtgatgagatgaatgaagacttcagatctggttctgaagcatttgatttgattgcacaagatgaagaagaatttaataaagagcatcaatttatacaggaagaaaacatagatgctcataatacttcggttgcactgggcgatacgtcctggggagctacaattaattacagtctgttgaggaaatcacgtagcacatcagatttggataaagatgatgccagttatttacgtctgtctttaggagagttctttgctcaaagatctgaagctcttggttgccttggtggtggtaacaatgtgaaaagaccatcatttggctattttattagatcaccagagaagagagaacctattgccttaataagaaaatctgatgtatcaagaggtaatttggaaaaagaaatggctcatcttaaccatgatctatattcaggagatttaaatgaacagtcccaggcacagctaagtgaaggatcaattacacttcaggttgaagcagtagagagtacttcacaagtggatgaaaatgatgtgacgttaacggctgataaaggcaaaacagaggacactttcttcatgagcaacaaaccccaaagatacaaagacaagctaccagatagtggtgattctatgcttaggatcagcaccattgcttcagccattgcagaggcatcagttaatactgatccttcccaacttgctgcaatgatcaaggcactttcaaataaaaccagagacaagacttttcaggaagatgagaaacaaaaggactattctcatgtgcgtcatttcttacctaatgatttagaaaaaagtaatggatccaatgcacttgatatggagaaataccttaaaaaaacagaagttagtagatatgaaagtgcattggaaaacttttcaagggctagtatgtctgatacttgggatttatctttgcccaaagaacaaactactcaagacattcatccggtggacttaagtgctactagtgtaagtgtgagggcaccagaagaaaacacagcagctattgtttatgttgaaaatggagagagtgagaatcaagagtcatttagaaccataaactcctcaaattcagttacaaatagagagaataacagtgcagtagttgatgtgaagacatgttccattgacaacaaattacaagatgttggtaacgatgaaaaagctacctcaatttccactccatctgatagttattcatcagtgaggaaccccagaataacatccctttgtctgttaaaagactgtgaagaaatacgagataacagagaaaatcagaggcaaaatgagtgtgtcagtgaaataagcaacagtgagaagcatgtgacttttgaaaaccatcgcatagtctcacctaaaaatagtgatttgaaaaatacctctcctgagcatggtggacgtggctcagaggatgagcaggagagcttcagaccttccacgtcaccactgagtcattcttctcctagtgaaatttctggaacgagttcatcagggtgtgcgttagagtcctttggttcagcagctcagcagcagcagcctccctgtgagcaggagttgtctcccttggtgtgctcgcctgctggggtgagcaggctgacgtatgtgtctgaaccagagagctcctatcctaccacagccacagatgatgccctggaggaccgcaagagtgatatcaccagcgagttgagtaccacaattattcaaggcagtccagccgcattggaggaacgggctatggaaaaattgagagaaaaagttccatttcagaatagaggaaaaggaacattatcatctattatccagaataactctgatacaagaaaagcaactgaaactacttctctgagtagcaagcctgaatatgtaaaacctgactttagatggagtaaagatccttcctccaaaagtggaaatctgttggaaaccagtgaggtaggttggacatcaaaccctgaggaattggacccgatcaggctggctctcctgggcaagtcaggtctgagctgtcaggtggggtcagccacatcacaccctgtgtcctgccaggagcctatagatgaagatcaaagaataagtcctaaagataagtcaactgctggccgtgagttcagtggccaggtttctcatcagaccacctctgaaaaccagtgtactcctattcccagcagcacagttcacagctctgtggctgacatgcagaacatgcctgctgctgtgcacgcactcttgacacaaccctctctcagcgctgctccttttgctcagcggtatttgggaacactcccttcaactggaagcaccaccttgcctcagtgccatgctggcaatgccacagtctgtggcttctcaggaggccttccctatccagctgttgcaggagagcctgtgcagaactctgtggctgtgggaatttgtctaggatcaaatatcggctctggatggatgggtacctcttccctctgtaacccatattctaataccttaaatcagaacctgctaagcacaacaaaaccttttcctgtgccgtctgttggtacaaactgtggaattgaaccatgggattcaggagtgacatcaggattggggagtgtccgagtgcccgaggagttgaagcttcctcatgcttgctgtgtcgggatcgcttcccagaccctcctcagtgtgcttaatccaactgaccgctggctgcaagtcagcattggggtcctcagcattagtgttaatggtgaaaaggtggatctttcaacatatcgttgtttagttttcaagaataaagccatcataagacctcatgccacagaagagataaaagtgctttttataccatccagtcctggggttttcagatgcacattcagtgttgcttcttggccatgttcgacagatgctgagaccatcgtacaggcagaagctttggccagcaccgtcactctcactgccattgccgagagtcctgttattgaggtagaaacagaaaagaaagacgttcttgattttggtgacttgacttatggaggctggaaagccctcccactaaaattgataaaccgaacgcatgccactgtgccaattagactgattattaatgctaacgctgtagcctggcgctgtttcacgttttccaaggaatccgtccgagctcctgtggaagttgctccttgcgctgatgtggtcactcggctagcaggcccttctgtggtcaaccacatgatgcctgctagttatgatggacaggatccagaatttctgatgatttgggttcttttccatagtccaaagaaacagatcagctcttcagatattctggactcagcagaagaattctcggcaaaagttgatatcgaagttgacagcccaaaccctacgcccgttcttagaagtgtgagtctccgagcaagagcaggaatagctaggatccatgctcccagggacttgcagacgatgcatttcttggccaaagtggcttcctcaagaaagcagcacttacctttgaaaaatgctgggaacattgaagtttatttggatatcaaggtcccagaacaaggaagtcacttttcagtggatccaaagaatctactccttaaacctggagaagaacatgaggttattgtttcatttactccaaaggatcctgaagcctgcgaggaaaggatcttgaaaatatttgtgcagccatttggacctcagtatgaggtagtgttaaaaggcgaagtcatttcttcaggaagtaaacctctgtcacctggaccttgcttagatattccatcgattttgtccaacaaacaatttctggcttggggaggagtccctctaggtagaacacagcttcagaaactagctttaagaaataattctgcatctacaactcaacatttacgactgcttattagaggacaagatcaggactgctttcagcttcagaacacttttggttcagaacagcgattgaccagtaactgtgagatcagaattcacccaaaggaagacattttcatctctgtattatttgcacctactcgattatcttgcatgttggctagactagaaatcaaacaacttggaaatcgatcacaaccaggcattaagttcacaatacctttgtctggatatggaggaacaagcaatcttattttggaaggcgttaaaaaattatctgacagttacatggtaacagtgaatggcttagtacctggcaaagaaagtaaaattgttttttctgtccgcaacactggctcccgagcagcttttgttaaagcagtaggttttaaggattctcagaaaaaagttttgctggatcctaaagtattgaggatttttccagataaatttgtactcaaggaaagaacacaagaaaatgttactttaatatataatccatcagacagaggaatcaataataaaactgcaacagaactatcaactgtatacttatttggtggagatgaaatttcaagacagcagtatcgcagggccctgttacataaaccagagatgataaaacagatacttccagaacatagtgtgcttcaaaacattaattttgttgaagcatttcaagatgagctattagtaactgaagtatatgatcttccccaacgacctaatgatgttcagctcttttatggaagcatgtgtaaaattatactttcagtaattggagaattcagagattgcatttctagcagagaattccttcagccttcttccaaagctagcttggaatctacaagcgacttgggagcttctgggaaacatggtggcaacgtctctttggatgttttaccagtcaaaggtcctcagggttctcctcttctctcacgggcggctcgcccgcctctggatcagctggcctccgaagagccgtggactgtcctacccgagcacttgattctggtagctccttctccttgtgacatggcaaaaactggacgtttccagattgtgaataactctgtgaggttactgagatttgagctgtgctggccagcgcattgcctcacagtcacgccgcagcatggatgtgtcgcgccagagagtaaactacaaattcttgtgagtcctaattcctccttatccacaaaacagtcaatgttcccgtggagtggtttgatctatatacactgtgacgatggacagaagaaaattgtgaaagttcaaattcgagaagatttaactcaagtggaacttttaactcgtttgacctccaaaccatttggaattctttccccagtatctgagccttcagttagtcatttggtcaaaccaatgacaaaaccgccttccacaaaagttgaaataagaaacaagagtattacttttcctacaacagaacctggtgaaacttcagagagctgtctagaactcgagaatcatggcaccacagacgtgaaatggcatctgtcatctttagcgccaccttatgtcaagggagttgatgaaagtggagatgtttttagagctacctatgcagcattcagatgttctcctatttctggtctgctggaaagccatgggatccaaaaagtctccatcacatttttgcccagaggtaggggggattatgcccagttttgggatgttgaatgtcaccctcttaaggagcctcacatgaaacacacgttgagattccaactctctggacaaagcatcgaagcagaaaatgagcctgaaaacgcatgcctttccacggattccctcattaaaatagatcatttagttaagccccgaagacaagctgtgtcagaggcttctgctcgcatacctgagcagcttgatgtgactgctcgtggagtttatgccccagaggatgtgtacaggttccggccgactagtgtgggggaatcacggacacttaaagtcaatctgcgaaataattcttttattacacactcactgaagtttttgagtcccagagagccattctatgtcaaacattccaagtactctttgagagcccagcattacatcaacatgcccgtgcagttcaaaccgaagtccgcaggcaaatttgaagctttgcttgtcattcaaacagatgaaggcaagagtattgctattcgactaattggtgaagctcttggaaaaaattaa

SEQ ID NO: 1038 - DNA, 1407 bp, Homo sapiens
atggcagcgtccagcaactccagcctgtccggctcgtcggtgtcctccgatgctgaagaataccagcctcctatatggaaatcatacttatatcagttacagcaagaggcacctcgtcccaagagaatcatttgtcctcgggaggtggaaaacagaccaaaatattatggaagagagtttcatgggatcatctctcgggagcaggcggatgagcttcttggaggcgtggagggtgcctacatccttagagaaagccagcggcaaccaggatgctacacgctggctctcaggtttggaaaccagaccttaaactacaggctcttccacgacgggaaacactttgtgggtgagaagaggtttgagtcgattcatgatctggtgacagatggcttgataacactgtacatagaaacaaaagctgccgagtacatttcaaaaatgacaactaaccccatctatgaacacattggatatgccaccctactcagagaaaaagtatccagaaggctgagcaggtctaaaaatgaaccaagaaaaacaaacgtcacacatgaagaacacacagcggtggaaaagatctcctccctggttcgaagggctgccctcacacacaacgacaaccacttcaattatgagaagacacacaactttaaggtccacacgttccgaggcccacactggtgtgaatattgtgccaatttcatgtgggggctcatcgcccaaggggtccggtgctcagactgtggattgaacgtacacaaacagtgttccaagcacgttcccaatgactgccaacctgatctcaagaggatcaagaaagtgtactgttgtgacctcacaacacttgtgaaggctcacaacactcagagacccatggtggtagacatatgcattcgggaaattgaagcaagaggattaaaatcggaaggcctttacagagtctctgggttcactgaacacattgaagatgtcaaaatggcatttgacagagatggtgaaaaggccgatatatctgccaatgtctatccagacataaacatcatcactggagcccttaaactgtatttcagagacttacccatccctgtcatcacatatgatacctattccaaatttatagatgcagcaaaaatctccaatgcagatgagaggctggaagccgtccatgaagtgctgatgctgctgcctcctgcccactatgaaaccctccggtacctaatgatccacctcaaaaaggttactatgaatgaaaaagacaatttcatgaatgcagaaaatctggggatcgtgtttgggcccactctgatgaggccccctgaggacagcaccctgaccaccctgcatgatatgcggtaccaaaagctgattgtgcagattttaatagaaaacgaagacgttttattctaa

SEQ ID NO: 1039 - DNA, 2118 bp, Homo sapiens
atgaccatagaggaccttccagattttccattagaaggaaatcctttgtttggaagatacccatttatattttctgcttctgataccccagttatcttttccatttctgcagcaccaatgccttcagactgtgaattttctttctttgatcctaatgatgcatcatgccaggaaattctttttgatcccaaaacttcagtttcagaattatttgccattttgagacagtgggttcctcaggtccaacaaaacattgacattattggaaatgagattcttaagagaggttgcaatgtgaatgatagagatggattgacagatatgactcttttacattatacctgcaaatctggagctcatggtattggtgatgtggaaacagctgtaaaatttgcaactcagcttattgacctgggagcagacattagtttgcggagtcgctggacaaacatgaatgctttgcattatgctgcttattttgatgtccctgaacttataagagtgattttgaaaacatcgaaaccaaaagatgtggatgccacttgcagtgattttaattttggaacagctttgcatattgcagcatacaacttgtgtgcaggtgctgtgaagtgcctcttggagcagggagcaaatcctgcatttaggaatgacaaaggacagatccctgctgatgttgttccagacccagtagatatgccgttagagatggctgacgccgcagccactgctaaggaaatcaagcagatgcttctagatgcggtgcctctgtcatgtaacatctcaaaggccatgctcccaaattatgatcatgtcactggcaaggcaatgcttacgtcacttggcctgaagttgggggatcgtgttgttattgcaggacagaaggttggtacattaagattttgtggaacaactgaatttgcaagtgggcagtgggctggcattgaactggatgaaccagaaggaaaaaataatggaagtgttggaaaagtccagtactttaaatgtgcccccaagtatggtatttttgcacctctttcaaagataagtaaagcaaaaggtcgaaggaagaatataacacacactccttctacaaaagctgctgtacctctcatcaggtcccagaaaattgacgtagctcatgtgacgtcaaaagtaaatactggattaatgacatcaaaaaaagatagtgcttctgagtcaacactttcattgcctcctggtgaagaacttaaaactgtgacagagaaagatgttgccctgcttggatctgtcagcagctgctcctctacatcttctttggaacacagacagagctaccccaagaaacagaatgcaatcagcagtaacaagaagacaatgagcaaaagcccttccctttcatccagagccagtgctggtttgaattcctcagcaacatctacagcaaataatagccgttgcgagggggaactccgcctcggagagagagtgttagtggtaggacagagactgggcaccattaggttctttgggacaacaaacttcgctccaggatattggtatggtatagagcttgaaaaaccccatggcaagaatgatggttcagttggaggtgtgcagtattttagctgttctccaagatatggaatatttgctcccccatccagggtgcaaagagtaacagattccctggataccctttcagaaatttcttcaaataaacagaaccattcttatcctggttttaggagaagttttagcacaacttctgcttcttcccaaaaggagattaacagaagaaatgctttttccaaatcgaaagctgctttgcgtcgcagttggagcagcacccccaccgcaggtggcattgaagggagcgtgaagctgcacgaggggtctcaggtcctgctcacgagctccaatgagatgggtactgttaggtatgtgggccccactgactttgcttcaggtatctggcttggacttgagctccgaagcgccaagggaaaaaatgatgggtcagtgggtgacaagcgctatttcacctgtaagccgaaccatggagtcttagttcgaccgagcagagtgacctatcggggaattaatgggtcaaaacttgtggatgagaattgttaa

SEQ ID NO: 1040 - DNA, 858 bp, Homo sapiens
atgccagcggcaactgtagatcatagccaaagaatttgtgaagtttgggcttgcaacttggatgaagagatgaagaaaattcgtcaagttatccgaaaatataattacgttgctatggacaccgagtttccaggtgtggttgcaagacccattggagaattcaggagcaatgctgactatcaataccaactattgcggtgtaatgtagacttgttaaagataattcagctaggactgacatttatgaatgagcaaggagaataccctccaggaacttcaacttggcagtttaattttaaatttaatttgacggaggacatgtatgcccaggactctatagagctactaacaacatctggtatccagtttaaaaaacatgaggaggaaggaattgaaacccagtactttgcagaacttcttatgacttctggagtggtcctctgtgaaggggtcaaatggttgtcatttcatagcggttacgactttggctacttaatcaaaatcctaaccaactctaacttgcctgaagaagaacttgacttctttgagatccttcgattgttttttcctgtcatttatgatgtgaagtacctcatgaagagctgcaaaaatctcaaaggtggattacaggaggtggcagaacagttagagctggaacggataggaccacaacatcaggcaggatctgattcattgctcacaggaatggcctttttcaaaatgagagaaatgttctttgaagatcatattgatgatgccaaatattgtggtcatttgtatggccttggttctggttcatcctatgtacagaatggcacagggaatgcatatgaagaggaagccaacaagcagtcatga

SEQ ID NO: 1041 - DNA, 1248 bp, Homo sapiens
atggattttgacaagaaaggagggaaaggggagacggaggagggccggagaatgtccaaggccggcgggggccggagcagccacggcatccggagctcggggaccagctcgggggtcctgatggtgggccccaacttccgcgtcggcaagaagatcggctgcggcaacttcggggagctccgcctaggaaagaatctctatacaaatgaatacgtggctatcaaattggagccgatcaagtcccgggccccgcagctgcacctggagtaccggttctacaagcagctcagcgccacagagggcgtccctcaggtctactacttcggtccgtgcgggaagtacaacgccatggtgctggagctgctggggcccagcctggaggacctgttcgacctgtgcgaccggaccttcacgctcaagacggtgctgatgatcgccatccagctgatcacgcgcatggagtatgtgcacaccaagagcctaatctaccgggacgtgaagcccgagaacttcctggtgggccgcccggggaccaagcggcagcatgccatccacatcatcgacttcgggctggccaaggagtacatcgaccccgagaccaagaagcacatcccgtaccgcgagcacaagagcctgacgggcacggcgcgctacatgagcatcaacacgcacctgggcaaggagcagagccgccgcgacgacctggaggcgctgggccacatgttcatgtacttcctgcgcggcagcctcccctggcaggggctcaaggccgacacgctcaaggagcggtaccagaagatcggggacaccaaacgcgccacgcccatcgaggtgctctgcgagaacttcccagaggagatggccacgtacctgcgctatgtgcggcgcctggacttcttcgagaagcccgactatgactacctgcggaagctcttcaccgacctcttcgaccgcagtggcttcgtgttcgactatgagtacgactgggccgggaagcccctgccgacccccatcggcaccgtccacaccgacctgccctcccagcctcagctccgggacaaaacccagccgcacagcaaaaaccaggcgttgaactccaccaacggggagctgaatgcggacgaccccacggccggccactccaacgccccgatcacagcgcctgcagaggtggaggtggccgatgaaaccaaatgctgctgtttcttcaagaggagaaagagaaaatcgctgcagcgacacaagtga

SEQ ID NO: 1042 - DNA, 297 bp, Homo sapiens
atgatgtgcggggcgccctccgccacgcagccggccaccgccgagacccagcacatcgccgaccaggtgaggtcccagcttgaagagaaagaaaacaagaagttccctgtgtttaaggccgtgtcattcaagagccaggtggtcgcggggacaaactacttcatcaaggtgcacgtcggcgacgaggacttcgtacacctgcgagtgttccaatctctccctcatgaaaacaagcccttgaccttatctaactaccagaccaacaaagccaagcatgatgagctgacctatttctga

SEQ ID NO: 1043 - DNA, 2382 bp, Homo sapiens
atgggagtctggttaaataaagatgactatatcagagacttgaaaaggatcattctctgttttctgatagtgtatatggccattttagtgggcacagatcaggatttttacagtttacttggagtgtccaaaactgcaagcagtagagaaataagacaagctttcaagaaattggcattgaagttacatcctgataaaaacccgaataacccaaatgcacatggcgattttttaaaaataaatagagcatatgaagtactcaaagatgaagatctacggaaaaagtatgacaaatatggagaaaagggacttgaggataatcaaggtggccagtatgaaagctggaactattatcgttatgattttggtatttatgatgatgatcctgaaatcataacattggaaagaagagaatttgatgctgctgttaattctggagaactgtggtttgtaaatttttactccccaggctgttcacactgccatgatttagctcccacatggagagactttgctaaagaagtggatgggttacttcgaattggagctgttaactgtggtgatgatagaatgctttgccgaatgaaaggagtcaacagctatcccagcctcttcatttttcggtctggaatggccccagtgaaatatcatggagacagatcaaaggagagtttagtgagttttgcaatgcagcatgttagaagtacagtgacagaactttggacaggaaattttgtcaactccatacaaactgcttttgctgctggtattggctggctgatcactttttgttcaaaaggaggagattgtttgacttcacagacacgactcaggcttagtggcatgttggatggtcttgttaatgtaggatggatggactgtgccacccaggataacctttgtaaaagcttagatattacaacaagtactactgcttattttcctcctggagccactttaaataacaaagagaaaaacagtattttgtttctcaactcattggatgctaaagaaatatatttggaagtaatacataatcttccagattttgaactactttcggcaaacacactagaggatcgtttggctcatcatcggtggctgttattttttcattttggaaaaaatgaaaattcaaatgatcctgagctgaaaaaactaaaaactctacttaaaaatgatcatattcaagttggcaggtttgactgttcctctgcaccagacatctgtagtaatctgtatgtttttcagccgtctctagcagtatttaaaggacaaggaaccaaagaatatgaaattcatcatggaaagaagattctatatgatatacttgcctttgccaaagaaagtgtgaattctcatgttaccacgcttggacctcaaaattttcctgccaatgacaaagaaccatggcttgttgatttctttgccccctggtgtccaccatgtcgagctttactaccagagttacgaagagcatcaaatcttctttatggtcagcttaagtttggtacactagattgtacagttcatgagggactctgtaacatgtataacattcaggcttatccaacaacagtggtattcaaccagtccaacattcatgagtatgaaggacatcactctgctgaacaaatcttggagttcatagaggatcttatgaatccttcagtggtctcccttacacccaccaccttcaacgaactagttacacaaagaaaacacaacgaagtctggatggttgatttctattctccgtggtgtcatccttgccaagtcttaatgccagaatggaaaagaatggcccggacattaactggactgatcaacgtgggcagtatagattgccaacagtatcattctttttgtgcccaggaaaacgttcaaagataccctgagataagattttttcccccaaaatcaaataaagcttatcattatcacagttacaatggttggaatagggatgcttattccctgagaatctggggtctaggatttttacctcaagtatccacagatctaacacctcagactttcagtgaaaaagttctacaagggaaaaatcattgggtgattgatttctatgctccttggtgtggaccttgccagaattttgctccagaatttgagctcttggctaggatgattaaaggaaaagtgaaagctggaaaagtagactgtcaggcttatgctcagacatgccagaaagctgggatcagggcctatccaactgttaaattttatttctacgaaagagcaaagagaaattttcaagaagagcagataaataccagagatgcaaaagcaatcgctgccttaataagtgaaaaattggaaactctccgaaatcaaggcaagaggaataaggatgaactttga

SEQ ID NO: 1044 - DNA, 1305 bp, Homo sapiens
atgtctattctcaagatccatgccagggagatctttgactctcgcgggaatcccactgttgaggttgatctcttcacctcaaaaggtctcttcagagctgctgtgcccagtggtgcttcaactggtatctatgaggccctagagctccgggacaatgataagactcgctatatggggaagggtgtctcaaaggctgttgagcacatcaataaaactattgcgcctgccctggttagcaagaaactgaacgtcacagaacaagagaagattgacaaactgatgatcgagatggatggaacagaaaataaatctaagtttggtgcgaacgccattctgggggtgtcccttgccgtctgcaaagctggtgccgttgagaagggggtccccctgtaccgccacatcgctgacttggctggcaactctgaagtcatcctgccagtcccggcgttcaatgtcatcaatggcggttctcatgctggcaacaagctggccatgcaggagttcatgatcctcccagtcggtgcagcaaacttcagggaagccatgcgcattggagcagaggtttaccacaacctgaagaatgtcatcaaggagaaatatgggaaagatgccaccaatgtgggggatgaaggcgggtttgctcccaacatcctggagaataaagaaggcctggagctgctgaagactgctattgggaaagctggctacactgataaggtggtcatcggcatggacgtagcggcctccgagttcttcaggtctgggaagtatgacctggacttcaagtctcccgatgaccccagcaggtacatctcgcctgaccagctggctgacctgtacaagtccttcatcaaggactacccagtggtgtctatcgaagatccctttgaccaggatgactggggagcttggcagaagttcacagccagtgcaggaatccaggtagtgggggatgatctcacagtgaccaacccaaagaggatcgccaaggccgtgaacgagaagtcctgcaactgcctcctgctcaaagtcaaccagattggctccgtgaccgagtctcttcaggcgtgcaagctggcccaggccaatggttggggcgtcatggtgtctcatcgttcgggggagactgaagataccttcatcgctgacctggttgtggggctgtgcactgggcagatcaagactggtgccccttgccgatctgagcgcttggccaagtacaaccagctcctcagaattgaagaggagctgggcagcaaggctaagtttgccggcaggaacttcagaaaccccttggccaagtaa

SEQ ID NO: 1045 - DNA, 1047 bp, Homo sapiens
atgaatatgactcaagcccgggttctggtggctgcagtggtggggttggtggctgtcctgctctacgcctccatccacaagattgaggagggccatctggctgtgtactacaggggaggagctttactaactagccccagtggaccaggctatcatatcatgttgcctttcattactacgttcagatctgtgcagacaacactacaaactgatgaagttaaaaatgtgccttgtggaacaagtggtggggtcatgatctatattgaccgaatagaagtggttaatatgttggctccttatgcagtgtttgatatcgtgaggaactatactgcagattatgacaagaccttaatcttcaataaaatccaccatgagctgaaccagttctgcagtgcccacacacttcaggaagtttacattgaattgtttgatcaaatagatgaaaacctgaagcaagctctgcagaaagacttaaacctcatggccccaggtctcactatacaggctgtgcgtgttacaaaacccaaaatcccagaagccataagaagaaattttgagttaatggaggctgagaagacaaaactccttatagctgcacagaaacaaaaggttgtggaaaaagaagctgagacagagaggaaaaaggcagttatagaagcagagaagattgcacaagtggcaaaaattcggtttcagcagaaagtgatggaaaaagaaactgaaaagcgcatttctgaaatcgaagatgctgcattcctggcccgagagaaagcgaaagcagatgctgaatattatgctgcacacaaatatgccacctcaaacaagcacaagttgaccccggaatatctggagctcaaaaagtaccaggccattgcttctaacagtaagatctattttggcagcaacatccctaacatgttcgtggactcctcatgtgctttgaaatattcagatattaggactggaagagaaagctcactcccctctaaggaggctcttgaaccctctggagagaacgtcatccaaaacaaagagagcacaggttga

SEQ ID NO: 1046 - DNA, 1359 bp, Homo sapiens
atgtctgagactcctgctcagtgtagcattaagcaggaacgaatttcatatacacctccagagagcccagtgccgagttacgcttcctcgacgccacttcatgttccagtgcctcgagcgctcaggatggaggaagactcgatccgcctgcctgcgcacctgcgcttgcagccaatttactggagcagggatgacgtagcccagtggctcaagtgggctgaaaatgagttttctttaaggccaattgacagcaacacgtttgaaatgaatggcaaagctctcctgctgctgaccaaagaggactttcgctatcgatctcctcattcaggtgatgtgctctatgaactccttcagcatattctgaagcagaggaaacctcggattcttttttcaccattcttccaccctggaaactctatacacacacagccggaggtcatactgcatcagaaccatgaagaagataactgtgtccagaggacccccaggccatccgtggataatgtgcaccataaccctcccaccattgaactgttgcaccgctccaggtcacctatcacgacaaatcaccggccttctcctgaccccgagcagcggcccctccggtcccccctggacaacatgatccgccgcctctccccggctgagagagctcagggacccaggccgcaccaggagaacaaccaccaggagtcctaccctctgtcagtgtctcccatggagaataatcactgcccagcgtcctccgagtcccacccgaagccatccagcccccggcaggagagcacacgcgtgatccagctgatgcccagccccatcatgcaccctctgatcctgaacccccggcactccgtggatttcaaacagtccaggctctccgaggacgggctgcatagggaagggaagcccatcaacctctctcatcgggaagacctggcttacatgaaccacatcatggtctctgtctccccgcctgaagagcacgccatgcccattgggagaatagcagactgtagactgctttgggattacgtctatcagttgctttctgacagccggtacgaaaacttcatccgatgggaggacaaagaatccaaaatattccggatagtggatcccaacggactggctcgactgtggggaaaccataagaacagaacaaacatgacctatgagaaaatgtccagagccctgcgccactactacaaactaaacattatcaggaaggagccaggacaaaggcttttgttcaggtttatgaaaaccccagatgaaatcatgagtggccgaacagaccgtctggagcacctagagtcccaggagctggatgaacaaatataccaagaagatgaatgctga

SEQ ID NO: 1047 - DNA, 2583 bp, Homo sapiens
atggcgccacccagtacccgggagcccagggtcctgtcggcgaccagcgcaaccaaatccgacggagagatggtgctgccaggcttcccggacgccgacagctttgtgaagtttgctcttgggtccgtggtggcagtcaccaaggcatctgggggcctaccacagtttggcgatgagtatgatttttaccgaagttttcctggcttccaagcattttgcgaaacacagggagacaggttgcttcagtgcatgagcagagtaatgcagtaccatgggtgtcgcagcaacattaaggatcgaagtaaagtgactgagctggaagacaagtttgatttactagttgatgccaatgatgtaattctggagagagtgggtattttactggatgaagcctcaggtgtaaacaagaatcaacagcctgtcctccctgccggcttgcaggtccccaaaacggtagtgtccagctggaaccgtaaggcagcagaatatggcaaaaaagcaaaatctgaaactttccggctgcttcatgcaaaaaatatcatccgacctcagctcaagtttcgagagaagattgacaattccaacacaccatttcttcctaaaatcttcatcaaacccaatgctcagaaacctctccctcaagctctctctaaggaaaggcgggaacgcccacaggatcgtcctgaggacttggacgtcccccctgcactggctgatttcatccatcagcagagaacccagcaggttgagcaagacatgtttgcacatccttatcaatatgaactaaatcactttaccccagcagatgcagtgcttcaaaagccacaaccccagttatacagacctatagaagagacaccatgccatttcatatcctccctggatgaactcgtggaactcaacgaaaagctcttgaattgtcaggaatttgcagttgacttggagcaccactcttacaggagcttcctgggactgacctgcctgatgcaaatttctactcggacggaagacttcatcattgacaccctcgagcttcgaagtgacatgtacattctcaatgagagcctcacagacccagccatcgttaaggtctttcatggtgctgattcagacatagaatggctacagaaagactttgggttgtatgtagtaaacatgtttgatactcatcaggcagcacgccttcttaacctgggcaggcactcactcgatcatctcctgaaactctactgcaacgtggactcaaacaagcaatatcagctggctgattggagaatacgccctctgcccgaggagatgctcagctacgcccgggatgacacccattacctgctatatatctatgacaaaatgaggctggagatgtgggagcgcggcaacgggcagccggtgcagctgcaggtggtgtggcaacggagcagggacatctgcctcaagaaattcatcaaacctatcttcacggatgagtcctaccttgaactctataggaagcagaagaagcaccttaacacacagcagttgacagcctttcagctgctgtttgcctggagggataaaacagctcgcagggaagatgaaagttacggatatgtactgccaaaccacatgatgctgaaaatagctgaagaactgcctaaggaacctcagggcatcatagcttgctgcaacccagtaccgccccttgtgcggcagcagatcaacgaaatgcaccttttaatccagcaggcccgagagatgcccctgctcaagtctgaagttgcagccggagtgaagaagagcggaccgctgcccagtgctgagagattggagaatgttctctttggacctcacgactgctcccatgcccctccggatggctatccaatcatcccaaccagtggatctgtgccagttcagaagcaggcgagcctcttccctgatgaaaaagaagataacttgctgggtaccacatgcctgattgccacagctgtcatcacgttatttaatgaacctagtgctgaagacagtaaaaagggtccattgacagttgcacagaaaaaagcccagaacatcatggagtcctttgaaaatccatttaggatgatcagcaaccgctggaagctggcccaggtacaagtacaaaaagactctaaagaagctgtcaagaagaaggcagctgagcaaacagctgcccgggaacaggcaaaggaggcgtgcaaagctgcagcagaacaggccatctccgtccgacagcaggtcgtgctagaaaatgctgcaaagaagagagagcgagcaacaagcgacccaaggaccacagaacagaaacaagagaagaaacgactcaaaatttccaagaagccaaaggacccagagccaccagaaaaagagtttacgccttacgactacagccagtcagacttcaaggcttttgctggaaacagcaaatccaaagtttcttctcagtttgatccaaataaacagaccccgtctggcaagaaatgcattgcagccaaaaaaattaaacagtcggtgggaaacaaaagcatgtcctttccaactggaaagtcagacagaggcttcaggtacaactggccacagagatag

SEQ ID NO: 1048 - DNA, 882 bp, Homo sapiens
atggcgatggagatgaggcttccagtggctcgcaagcctcttagcgagagactgggccgcgacactaagaaacatctagtggtgccgggggatacaatcactacggacacaggattcatgcggggccatggaacgtatatgggagaagagaagctcattgcatctgttgctggctctgtggagagagtaaacaagttgatctgtgtgaaagctttgaaaaccagatacattggtgaagtaggagacatcgtagtgggacgaatcacagaggttcaacagaagaggtggaaggtggagaccaactccaggctggattcggtcttgctgctctcgtccatgaaccttcctggaggagagctgaggagaagatctgcagaagatgagcttgcaatgagaggtttcttacaggaaggggaccttatcagtgctgaggtccaggcagtgttctctgacggagctgtctctttgcacacgaggagcctgaaatatggaaaactaggtcagggggttttggtccaggtttccccctccctggtgaaacggcagaagacccactttcatgatttgccatgtggtgcctcagtgattctcggtaacaacggcttcatctggatttacccaacacctgagcacaaagaagaggaagcagggggcttcattgcaaacctggagcctgtctctcttgctgatcgagaggtgatatcccggcttcggaactgcatcatctcgctggtaactcagaggatgatgctgtatgataccagcatcctgtactgctatgaagcatcccttccacatcagatcaaagacatcttaaagccagaaataatggaggagattgtgatggaaacacgccagaggcttttggaacaggagggataa

SEQ ID NO: 1049 - DNA, 1320 bp, Homo sapiens
atgaaggaaacgccactctcaaactgcgaacgccgcttcctactccgtgccatcgaagagaagaagcggctggatggcagacaaacctatgattataggaacatcaggatctcatttggaacagattacggatgctgcattgtggaacttggaaaaacaagagttcttggacaggtttcctgtgaacttgtgtctccaaaactcaatcgggcaacagaaggtattcttttttttaaccttgaactctctcagatggccgctccagctttcgaacctggcaggcagtcagatctcttggtgaagttgaatcgactcatggaaagatgtctaagaaattcgaagtgtatagacactgagtctctctgtgttgttgctggtgaaaaggtttggcaaatacgtgtagacctacatttattaaatcatgatggaaatattattgatgctgccagcattgctgcaatcgtggccttatgtcatttccgaagacctgatgtctctgtccaaggagatgaagtaacactgtatacacctgaagagcgtgatcctgtaccattaagtatccaccacatgcccatttgtgtcagttttgcctttttccagcaaggaacatatttattggtggatcccaatgaacgagaagaacgtgtgatggatggcttgctggtgattgccatgaacaaacatcgagagatttgtactatccagtccagtggtgggataatgctactaaaagatcaagttctgagatgcagtaaaatcgctggtgtgaaagtagcagaaattacagagctaatattgaaagctttggagaatgaccaaaaagtaaggaaagaaggtggaaagtttggttttgcagagtctatagcaaatcaaaggatcacagcatttaaaatggaaaaggcccctattgatacctcggatgtagaagaaaaagcagaagaaatcattgctgaagcagaacctccttcagaagttgtttctacacctgtgctatggactcctggaactgcccaaattggagagggagtagaaaactcctggggtgatcttgaagactctgagaaggaagatgatgaaggcggtggtgatcaagctatcattcttgatggtataaaaatggacactggagtagaagtctctgatattggaagccaagatgctcccataatactctcagatagtgaagaagaagaaatgatcattttggaaccagacaagaatccaaagaaaataagaacacagaccaccagtgcaaaacaagaaaaagcaccaagtaaaaagccagtgaaaagaagaaaaaagaagagagctgccaattaa

SEQ ID NO: 1050 - DNA, 966 bp, Homo sapiens
atgaagccaggattcagtccccgtgggggtggctttggcggccgagggggctttggtgaccgtggtggtcgtggaggccgagggggctttggcgggggccgaggtcgaggcggaggctttagaggtcgtggacgaggaggaggtggaggcggcggcggcggtggaggaggaggaagaggtggtggaggcttccattctggtggcaaccggggtcgtggtcggggaggaaaaagaggaaaccagtcggggaagaatgtgatggtggagccgcatcggcatgagggtgtcttcatttgtcgaggaaaggaagatgcactggtcaccaagaacctggtccctggggaatcagtttatggagagaagagagtctcgatttcggaaggagatgacaaaattgagtaccgagcctggaaccccttccgctccaagctagcagcagcaatcctgggtggtgtggaccagatccacatcaaaccgggggctaaggttctctacctcggggctgcctcgggcaccacggtctcccatgtctctgacatcgttggtccggatggtctagtctatgcagtcgagttctcccaccgctctggccgtgacctcattaacttggccaagaagaggaccaacatcattcctgtgatcgaggatgctcgacacccacacaaataccgcatgctcatcgcaatggtggatgtgatctttgctgatgtggcccagccagaccagacccggattgtggccctgaatgcccacaccttcctgcgtaatggaggacactttgtgatttccattaaggccaactgcattgactccacagcctcagccgaggccgtgtttgcctccgaagtgaaaaagatgcaacaggagaacatgaagccgcaggagcagttgacccttgagccatatgaaagagaccatgccgtggtcgtgggagtgtacaggccaccccccaaggtgaagaactga

SEQ ID NO: 1051 - DNA, 2532 bp, Homo sapiens; identical to SEQ ID NO: 280

SEQ ID NO: 1052 - DNA, 261 bp, Homo sapiens
atgattccagcagtggtcttgctcttactccttttggttgaacaagcagcggccctgggagagcctcagctctgctatatcctggatgccatcctgtttctgtatggaattgtcctcaccctcctctactgtcgactgaagatccaagtgcgaaaggcagctataaccagctatgagaaatcagatggtgtttacacgggcctgagcaccaggaaccaggagacttacgagactctgaagcatgagaaaccaccacagtag

SEQ ID NO: 1053 - DNA, 1590 bp, Homo sapiens; identical to SEQ ID NO: 284

SEQ ID NO: 1054 - DNA, 3810 bp, Homo sapiens
atggaggccaccggggtgctgccgttcgtgcgtggcgtggacctcagcggcaacgacttcaagggcggctacttccctgagaatgtcaaggccatgaccagcctgcggtggctgaagctgaaccgcactggcctctgctacctgcccgaggagctggccgccctgcagaagctggaacacttgtctgtgagccacaacaacctgaccacgcttcatggggagctgtccagcctgccatcgctgcgcgccatcgtggcccgagccaacagtctgaagaattccggagtccccgatgacatcttcaagctagatgatctctcagtcctggacttgagccacaaccagctgacagagtgcccgcgggagctggagaacgccaagaacatgctggtgctgaacctcagccacaacagcatcgacaccatccccaaccagctcttcatcaacctcactgacctactatacctggacctcagcgagaaccgcctggagagcctgcccccgcagatgcgccgcctggtgcacctgcagacgctcgtgctcaatggaaaccccctgctgcatgcacagctccggcagctcccagcgatgacggccctgcagaccctgcacctgcggagcacccagcgcacccagagcaacctgcccaccagcctggagggtctgagcaacctcgcagacgtggatctgtcctgcaatgacctgacacgggtgcccgagtgtctgtacaccctccccagcctgcgccgcctcaacctcagcagcaaccagatcacggagctgtccctgtgcatagaccagtgggtgcacgtggaaactctgaacctgtcccgaaatcagctcacctcactgccctcagccatttgcaagctgagcaagctgaagaagctgtacctgaattccaacaagctggactttgacgggctgccctcaggcattggcaagctcaccaacctggaagagttcatggctgccaacaacaacctggagctggtccctgaaagtctctgcaggtgcccaaagctgaggaaacttgtcctgaacaagaaccacctggtgaccctcccagaagccatccatttcctgacggagatcgaggtcctggatgtgcgggagaaccccaacctggtcatgccgcccaagcccgcagaccgtgccgctgagtggtacaacatcgacttctcgctgcagaaccagctgcggctagcgggtgcctctcctgctaccgtggctgcagctgcagctgcagggagtgggcccaaggaccctatggctcgcaagatgcgactgcggaggcgcaaggattcagcccaggatgaccaggccaagcaggtgctgaagggcatgtcagatgttgcccaggagaagaacaaaaagcaggaggagagcgcagatgcccgggcccccagcgggaaggtgcggcgttgggaccagggcctggagaagccccgccttgactactccgagttcttcacggaggacgtgggccagctgcccggactgaccatctggcagatagagaacttcgtgcctgtgctggtggaggaagccttccacggcaagttctacgaggctgactgctacattgtgctcaagacctttctggatgacagcggctccctcaactgggagatctactactggattggcggggaggccacactcgacaagaaagcttgctctgccatccacgctgtcaacttgcgcaactacctgggtgctgagtgccgcactgtccgggaggagatgggcgatgagagcgaggagttcctgcaggtgtttgacaacgacatctcctacattgagggtggaacagccagtggcttctacactgtggaagacacacactatgtcaccaggatgtatcgtgtgtatgggaaaaagaacatcaagttggagcctgtgcccctcaaggggacctctctggacccaaggtttgttttcctgctggaccgagggctagacatctacgtatggcggggggcccaggccacactgagcagcaccaccaaggccaggctctttgcagagaaaattaacaagaatgagcggaaagggaaggctgagatcacactgctggtgcagggccaggagctcccagagttctgggaggcactgggtggggagccctctgagatcaagaagcacgtgcctgaagacttctggccgccgcagcccaagctgtacaaggtgggcctgggcttgggctacctggagctgccacagatcaactacaagctctccgtggaacataagcagcgtcccaaggtggagctgatgccaagaatgcggctgctgcagagtctgctggacacgcgctgcgtgtacattctggactgttggtccgacgtgttcatctggctcggccgcaagtccccgcgcctggtgcgcgctgccgccctcaagctgggtcaggagctgtgcgggatgctgcaccggccacgccatgccacggtcagccgcagcctcgagggcaccgaggcgcaggtgttcaaggccaagttcaagaattgggacgatgtgttgacggtggactacacacgcaatgcggaggccgtgctgcagagcccgggtctctccgggaaggtgaaacgcgacgccgagaagaaagaccagatgaaggctgacctcactgcgcttttcctgccgcggcagccgcccatgtcgctggccgaggcggagcagctgatggaggagtggaacgaagacctagacggcatggagggtttcgtgctggagggcaagaagtttgcgcggctgccggaagaggagtttggccacttctacacgcaggactgctacgtcttcctctgcaggtactgggtgcctgtggagtacgaggaggaggaaaagaaggaagacaaggaggagaaggccgagggcaaagaaggcgaggaagcaaccgctgaggcagaggagaagcagccagaggaggacttccagtgcatcgtgtacttctggcagggccgtgaagcctccaatatgggctggctcaccttcaccttcagcctgcaaaagaagttcgagagcctcttccctgggaagctggaggtggtacgcatgacgcagcagcaggagaaccccaagttcctgtcccatttcaagaggaagttcatcatccaccggggcaagaggaaggcggtccagggcgcccaacagcccagcctctaccagatccgcaccaacggcagcgccctctgcacccggtgcatccagatcaacaccgactccagcctcctcaactccgagttctgcttcatcctcaaggttccctttgagagtgaggacaaccagggcatcgtgtatgcctgggtgggccgggcatcagaccctgacgaagccaagttggcagaagacatcctgaacaccatgtttgacacctcctacagcaagcaggttatcaacgaaggtgaggagcctgagaacttcttctgggtgggcattggggcacagaagccctatgatgacgatgccgagtacatgaaacacacacgtctcttccggtgctccaacgagaagggctactttgcagtgactgagaaatgctccgacttttgccaagatgacctggcagatgatgacatcatgttgctagacaatggccaagaggtctacatgtgggtggggacccagactagccaggtggagatcaagctgagcctgaaggcctgccaggtatatatccagcacatgcggtccaaggaacatgagcggccgcgccggctgcgcctggtccgcaagggcaatgagcagcacgcctttacccgctgcttccacgcctggagcgccttctgcaaggccctggcctaa

SEQ ID NO: 1055 - DNA, 1284 bp, Homo sapiens
atgtttttcacttgtggcccaaatgaggccatggtggtctccgggttctgccgaagccccccagtcatggtggctggagggcgtgtctttgtcctgccctgcatccaacagatccagaggatctctctcaacacactgaccctcaatgtcaagagtgaaaaggtttacactcgccatggggtccccatctcagtcactggcattgcccaggtaaaaatccaggggcagaacaaggagatgttggcggccgcctgtcagatgttcctggggaagacggaggctgagattgcccacattgccctggagacgttagagggccaccagagggccatcatggcccacatgactgtggaggagatctataaggacaggcagaaattctcagaacaggttttcaaagtggcctcctcagacctggtcaacatgggcatcagtgtggttagctacactctgaaggacattcacgatgaccaggactatttgcactctttggggaaggctcgaacagctcaagtccaaaaagatgcacggattggagaagcagaggccaagagagatgctgggatccgggaagctaaagccaagcaggaaaaggtgtctgctcagtacctgagtgagatcgagatggccaaggcacagagagattacgaactgaagaaggccgcctatgacatcgaggtcaacacccgccgagcacaggctgacctggcctatcagcttcaggtggccaagactaagcagcagattgaggagcagcgggtgcaggtgcaggtggtggagcgggcccagcaggtggcagtgcaggagcaggagatcgcccggcgggagaaggagctggaggcccgggtgcggaagccagcggaagcggagcgctacaagctggagcgcctagccgaggcagagaagtcccaactaattatgcaggcggaggcagaagccgcgtctgtgcggatgcgtggggaagctgaggcctttgccataggggcccgagcccgagccgaggctgagcagatggccaagaaggcagaagccttccagctgtaccaagaggctgctcagctggacatgctgctagagaagctgccccaggtggcagaggagatcagtggtcccttgacttcagccaataagatcacactggtgtccagcggcagtgggaccatgggggcagccaaagtgactggggaagtactggacattctaactcgcctgccagagagtgtggaaagactcacaggcgtgagcatctcccaggtgaatcacaagcctttgagaacagcctga

SEQ ID NO: 1056 - DNA, 1140 bp, Homo sapiens
atggcggccaccgagggggtcggggaggctgcgcaagggggcgagcccgggcagccggcgcaacccccgccccagccgcacccaccgccgccccagcagcagcacaaggaagagatggcggccgaggctggggaagccgtggcgtcccccatggacgacgggtttgtgagcctggactcgccctcctatgtcctgtacagggacagagcagaatgggctgatatagatccggtgccgcagaatgatggccccaatcccgtggtccagatcatttatagtgacaaatttagagatgtttatgattacttccgagctgtcctgcagcgtgatgaaagaagtgaacgagcttttaagctaacccgggatgctattgagttaaatgcagccaattatacagtgtggcatttccggagagttcttttgaagtcacttcagaaggatctacatgaggaaatgaactacatcactgcaataattgaggagcagcccaaaaactatcaagtttggcatcataggcgagtattagtggaatggctaagagatccatctcaggagcttgaatttattgctgatattcttaatcaggatgcaaagaattatcatgcctggcagcatcgacaatgggttattcaggaatttaaactttgggataatgagctgcagtatgtggaccaacttctgaaagaggatgtgagaaataactctgtctggaaccaaagatacttcgttatttctaacaccactggctacaatgatcgtgctgtattggagagagaagtccaatacactctggaaatgattaaactagtaccacataatgaaagtgcatggaactatttgaaagggattttgcaggatcgtggtctttccaaatatcctaatctgttaaatcaattacttgatttacaaccaagtcatagttccccctacctaattgcctttcttgtggatatctatgaagacatgctagaaaatcagtgtgacaataaggaagacattcttaataaagcattagagttatgtgaaatcctagctaaagaaaaggacactataagaaaggaatattggagatacattggaagatcccttcaaagcaaacacagcacagaaaatgactcaccaacaaatgtacagcaataa

SEQ ID NO: 1057 - DNA, 1638 bp, Homo sapiens
atgggccggcggggctcagcccccggaaacggtcgtacacttcggggctgcgagcgcggagggcgacgacgacgaagcgcagacagcgtcatggcagagcaggtggccctgagccggacccaggtgtgcgggatcctgcgggaagagcttttccagggcgatgccttccatcagtcggatacacacatattcatcatcatgggtgcatcgggtgacctggccaagaagaagatctaccccaccatctggtggctgttccgggatggccttctgcccgaaaacaccttcatcgtgggctatgcccgttcccgcctcacagtggctgacatccgcaaacagagtgagcccttcttcaaggccaccccagaggagaagctcaagctggaggacttctttgcccgcaactcctatgtggctggccagtacgatgatgcagcctcctaccagcgcctcaacagccacatgaatgccctccacctggggtcacaggccaaccgcctcttctacctggccttgcccccgaccgtctacgaggccgtcaccaagaacattcacgagtcctgcatgagccagataggctggaaccgcatcatcgtggagaagcccttcgggagggacctgcagagctctgaccggctgtccaaccacatctcctccctgttccgtgaggaccagatctaccgcatcgaccactacctgggcaaggagatggtgcagaacctcatggtgctgagatttgccaacaggatcttcggccccatctggaaccgggacaacatcgcctgcgttatcctcaccttcaaggagccctttggcactgagggtcgcgggggctatttcgatgaatttgggatcatccgggacgtgatgcagaaccacctactgcagatgctgtgtctggtggccatggagaagcccgcctccaccaactcagatgacgtccgtgatgagaaggtcaaggtgttgaaatgcatctcagaggtgcaggccaacaatgtggtcctgggccagtacgtggggaaccccgatggagagggcgaggccaccaaagggtacctggacgaccccacggtgccccgcgggtccaccaccgccacttttgcagccgtcgtcctctatgtggagaatgagaggtgggatggggtgcccttcatcctgcgctgcggcaaggccctgaacgagcgcaaggccgaggtgaggctgcagttccatgatgtggccggcgacatcttccaccagcagtgcaagcgcaacgagctggtgatccgcgtgcagcccaacgaggccgtgtacaccaagatgatgaccaagaagccgggcatgttcttcaaccccgaggagtcggagctggacctgacctacggcaacagatacaagaacgtgaagctccctgacgcctatgagcgcctcatcctggacgtcttctgcgggagccagatgcacttcgtgcgcagcgacgagctccgtgaggcctggcgtattttcaccccactgctgcaccagattgagctggagaagcccaagcccatcccctatatttatggcagccgaggccccacggaggcagacgagctgatgaagagagtgggtttccagtatgagggcacctacaagtgggtgaacccccacaagctctga

SEQ ID NO: 1058 - DNA, 3612 bp, Homo sapiens
atggcggcgtgtggacgtgtacggaggatgttccgcttgtcggcggcgctgcatctgctgctgctattcgcggccggggccgagaaactccccggccagggcgtccacagccagggccagggtcccggggccaactttgtgtccttcgtagggcaggccggaggcggcggcccggcgggtcagcagctgccccagctgcctcagtcatcgcagcttcagcagcaacagcagcagcagcaacagcaacagcagcctcagccgccgcagccgcctttcccggcgggtgggcctccggcccggcggggaggagcgggggctggtgggggctggaagctggcggaggaagagtcctgcagggaggacgtgacccgcgtgtgccctaagcacacctggagcaacaacctggcggtgctcgagtgcctgcaggatgtgagggagcctgaaaatgaaatttcttcagactgcaatcatttgttgtggaattataagctgaacctaactacagatcccaaatttgaatctgtggccagagaggtttgcaaatctactataacagagattaaagaatgtgctgatgaaccggttggaaaaggttacatggtttcctgcttggtggatcaccgaggcaacatcactgagtatcagtgtcaccagtacattaccaagatgacggccatcatttttagtgattaccgtttaatctgtggcttcatggatgactgcaaaaatgacatcaacattctgaaatgtggcagtattcggcttggagaaaaggatgcacattcacaaggtgaggtggtatcatgcttggagaaaggcctggtgaaagaagcagaagaaagagaacccaagattcaagtttctgaactctgcaagaaagccattctccgggtggctgagctgtcatcggatgactttcacttagaccggcatttatattttgcttgccgagatgatcgggagcgtttttgtgaaaatacacaagctggtgagggcagagtgtataagtgcctctttaaccataaatttgaagaatccatgagtgaaaagtgtcgagaagcacttacaacccgccaaaagctgattgcccaggattataaagtcagttattcattggccaaatcctgtaaaagtgacttgaagaaataccggtgcaatgtggaaaaccttccgcgatcgcgtgaagccaggctctcctacttgttaatgtgcctggagtcagctgtacacagagggcgacaagtcagcagtgagtgccagggggagatgctggattaccgacgcatgttgatggaagacttttctctgagccctgagatcatcctaagctgtcggggggagattgaacaccattgttccggattacatcgaaaagggcggaccctacactgtctgatgaaagtagttcgaggggagaaggggaaccttggaatgaactgccagcaggcgcttcaaacactgattcaggagactgaccctggtgcagattaccgcattgatcgagctttgaatgaagcttgtgaatctgtaatccagacagcctgcaaacatataagatctggagacccaatgatcttgtcgtgcctgatggaacatttatacacagagaagatggtagaagactgtgaacaccgtctcttagagctgcagtatttcatctcccgggattggaagctggaccctgtcctgtaccgcaagtgccagggagacgcttctcgtctttgccacacccacggttggaatgagaccagtgaatttatgcctcagggagctgtgttctcttgtttatacagacacgcctaccgcactgaggaacagggaaggaggctctcacgggagtgccgagctgaagtccaaaggatcctacaccagcgtgccatggatgtcaagctggatcctgccctccaggataagtgcctgattgatctgggaaaatggtgcagtgagaaaacagagactggacaggagctggagtgccttcaggaccatctggatgacttggtggtggagtgtagagatatagttggcaacctcactgagttagaatcagaggatattcaaatagaagccttgctgatgagagcctgtgagcccataattcagaacttctgccacgatgtggcagataaccagatagactctggggacctgatggagtgtctgatacagaacaaacaccagaaggacatgaacgagaagtgtgccatcggagttacccacttccagctggtgcagatgaaggattttcggttttcttacaagtttaaaatggcctgcaaggaggacgtgttgaagctttgcccaaacataaaaaagaaggtggacgtggtgatctgcctgagcacgaccgtgcgcaatgacactctgcaggaagccaaggagcacagggtgtccctgaagtgccgcaggcagctccgtgtggaggagctggagatgacggaggacatccgcttggagccagatctatacgaagcctgcaagagtgacatcaaaaacttctgttccgctgtgcaatatggcaacgctcagattatcgaatgtctgaaagaaaacaagaagcagctaagcacccgctgccaccaaaaagtatttaagctgcaggagacagagatgatggacccagagctagactacaccctcatgagggtctgcaagcagatgataaagaggttctgtccggaagcagattctaaaaccatgttgcagtgcttgaagcaaaataaaaacagtgaattgatggatcccaaatgcaaacagatgataaccaagcgccagatcacccagaacacagattaccgcttaaaccccatgttaagaaaagcctgtaaagctgacattcctaaattctgtcacggtatcctgactaaggccaaggatgattcagaattagaaggacaagtcatctcttgcctgaagctgagatatgctgaccagcgcctgtcttcagactgtgaagaccagatccgaatcattatccaggagtccgccctggactaccgcctggatcctcagctccagctgcactgctcagacgagatctccagtctatgtgctgaagaagcagcagcccaagagcagacaggtcaggtggaggagtgcctcaaggtcaacctgctcaagatcaaaacagaattgtgtaaaaaggaagtgctaaacatgctgaaggaaagcaaagcagacatctttgttgacccggtacttcatactgcttgtgccctggacattaaacaccactgcgcagccatcacccctggccgcgggcgtcaaatgtcctgtctcatggaagcactggaggataagcgggtgaggttacagcccgagtgcaaaaagcgcctcaatgaccggattgagatgtggagttacgcagcaaaggtggccccagcagatggcttctctgatcttgccatgcaagtaatgacgtctccatctaagaactacattctctctgtgatcagtgggagcatctgtatattgttcctgattggcctgatgtgtggacggatcaccaagcgagtgacacgagagctcaaggacaggctacaatacaggtcagagacaatggcttataaaggtttagtgtggtctcaggatgtgacaggcagtccagcctga

SEQ ID NO: 1059 - DNA, 207 bp, Homo sapiens
atgtctggctcctccagcgtcgccgctatgaagaaagtggttcaacagctccggctggaggccggactcaaccgcgtaaaagtttcccaggcagctgcagacttgaaacagttctgtctgcagaatgctcaacatgaccctctgctgactggagtatcttcaagtacaaatcccttcagaccccagaaagtctgttcctttttgtag

SEQ ID NO: 1060 - DNA, 1677 bp, Homo sapiens
atggccgctctcacccgggacccccagttccagaagctgcagcaatggtaccgcgagcaccgctccgagctgaacctgcgccgcctcttcgatgccaacaaggaccgcttcaaccacttcagcttgaccctcaacaccaaccatgggcatatcctggtggattactccaagaacctggtgacggaggacgtgatgcggatgctggtggacttggccaagtccaggggcgtggaggccgcccgggagcggatgttcaatggtgagaagatcaactacaccgagggtcgagccgtgctgcacgtggctctgcggaaccggtcaaacacacccatcctggtagacggcaaggatgtgatgccagaggtcaacaaggttctggacaagatgaagtctttctgccagcgtgtccggagcggtgactggaaggggtacacaggcaagaccatcacggacgtcatcaacattggcattggcggctccgacctgggacccctcatggtgactgaagcccttaagccatactcttcaggaggtccccgcgtctggtatgtctccaacattgatggaactcacattgccaaaaccctggcccagctgaaccccgagtcctccctgttcatcattgcctccaagacctttactacccaggagaccatcacgaatgcagagacggcgaaggagtggtttctccaggcggccaaggatccttctgcagtggcgaagcactttgttgccctgtctactaacacaaccaaagtgaaggagtttggaattgaccctcaaaacatgttcgagttctgggattgggtgggaggacgctactcgctgtggtcggccatcggactctccattgccctgcacgtgggttttgacaacttcgagcagctgctctcgggggctcactggatggaccagcacttccgcacgacgcccctggagaagaacgcccccgtcttgctggccctgctgggtatctggtacatcaactgctttgggtgtgagacacacgccatgctgccctatgaccagtacctgcaccgctttgctgcgtacttccagcagggcgacatggagtccaatgggaaatacatcaccaaatctggaacccgtgtggaccaccagacaggccccattgtgtggggggagccagggaccaatggccagcatgctttttaccagctcatccaccaaggcaccaagatgataccctgtgacttcctcatcccggtccagacccagcaccccatacggaagggtctgcatcacaagatcctcctggccaacttcttggcccagacagaggccctgatgaggggaaaatcgacggaggaggcccgaaaggagctccaggctgcgggcaagagtccagaggaccttgagaggctgctgccacataaggtctttgaaggaaatcgcccaaccaactctattgtgttcaccaagctcacaccattcatgcttggagccttggtcgccatgtatgagcacaagatcttcgttcagggcatcatctgggacatcaacagctttgaccagtggggagtggagctgggaaagcagctggctaagaaaatagagcctgagcttgatggcagtgctcaagtgacctctcacgacgcttctaccaatgggctcatcaacttcatcaagcagcagcgcgaggccagagtccaataa

SEQ ID NO: 1061 - DNA, 1116 bp, Homo sapiens
atgtcccatgaaaagagttttttggtgtctggggacaactatcctccccccaaccctggatatccgggggggccccagccacccatgcccccctatgctcagcctccctaccctggggccccttacccacagccccctttccagccctccccctacggtcagccagggtacccccatggccccagcccctacccccaagggggctacccacagggtccctacccccaagggggctacccacagggcccctacccacaagagggctacccacagggcccctacccccaagggggctacccccaggggccatatccccagagccccttcccccccaacccctatggacagccacaggtcttcccaggacaagaccctgactcaccccagcatggaaactaccaggaggagggtcccccatcctactatgacaaccaggacttccctgccaccaactgggatgacaagagcatccgacaggccttcatccgcaaggtgttcctagtgctgaccttgcagctgtcggtgaccctgtccacggtgtctgtgttcacttttgttgcggaggtgaagggctttgtccgggagaatgtctggacctactatgtctcctatgctgtcttcttcatctctctcatcgtcctcagctgttgtggggacttccggcgaaagcacccctggaaccttgttgcactgtcggtcctgaccgccagcctgtcgtacatggtggggatgatcgccagcttctacaacaccgaggcagtcatcatggccgtgggcatcaccacagccgtctgcttcaccgtcgtcatcttctccatgcagacccgctacgacttcacctcatgcatgggcgtgctcctggtgagcatggtggtgctcttcatcttcgccattctctgcatcttcatccggaaccgcatcctggagatcgtgtacgcctcactgggcgctctgctcttcacctgcttcctcgcagtggacacccagctgctactggggaacaagcagctgtccctgagcccagaagagtatgtgtttgctgcgctgaacctgtacacagacatcatcaacatcttcctgtacatcctcaccatcattggccgcgccaaggagtag

SEQ ID NO: 1062 - DNA, 1581 bp, Homo sapiens; identical to SEQ ID NO: 306

SEQ ID NO: 1063 - DNA, 3069 bp, Homo sapiens; identical to SEQ ID NO: 308

SEQ ID NO: 1064 - DNA, 783 bp, Homo sapiens
atgcgccctgaagacagaatgttccatatcagagctgtgatcttgagagccctctccttggctttcctgctgagtctccgaggagctggggccatcaaggcggaccatgtgtcaacttatgccgcgtttgtacagacgcatagaccaacaggggagtttatgtttgaatttgatgaagatgagatgttctatgtggatctggacaagaaggagaccgtctggcatctggaggagtttggccaagccttttcctttgaggctcagggcgggctggctaacattgctatattgaacaacaacttgaataccttgatccagcgttccaaccacactcaggccaccaacgatccccctgaggtgaccgtgtttcccaaggagcctgtggagctgggccagcccaacaccctcatctgccacattgacaagttcttcccaccagtgctcaacgtcacgtggctgtgcaacggggagctggtcactgagggtgtcgctgagagcctcttcctgcccagaacagattacagcttccacaagttccattacctgacctttgtgccctcagcagaggacttctatgactgcagggtggagcactggggcttggaccagccgctcctcaagcactgggaggcccaagagccaatccagatgcctgagacaacggagactgtgctctgtgccctgggcctggtgctgggcctagtcggcatcatcgtgggcaccgtcctcatcataaagtctctgcgttctggccatgacccccgggcccaggggaccctgtga

SEQ ID NO: 1065 - DNA, 1737 bp, Homo sapiens
atgctgccgtgcctcgtagtgctgctggcggcgctcctcagcctccgtcttggctcagacgctcatgggacagagctgcccagccctccgtctgtgtggtttgaagcagaatttttccaccacatcctccactggacacccatcccaaatcagtctgaaagtacctgctatgaagtggcgctcctgaggtatggaatagagtcctggaactccatctccaactgtagccagaccctgtcctatgaccttaccgcagtgaccttggacctgtaccacagcaatggctaccgggccagagtgcgggctgtggacggcagccggcactccaactggaccgtcaccaacacccgcttctctgtggatgaagtgactctgacagttggcagtgtgaacctagagatccacaatggcttcatcctcgggaagattcagctacccaggcccaagatggcccccgcaaatgacacatatgaaagcatcttcagtcacttccgagagtatgagattgccattcgcaaggtgccgggaaacttcacgttcacacacaagaaagtaaaacatgaaaacttcagcctcctaacctctggagaagtgggagagttctgtgtccaggtgaaaccatctgtcgcttcccgaagtaacaaggggatgtggtctaaagaggagtgcatctccctcaccaggcagtatttcaccgtgaccaacgtcatcatcttctttgcctttgtcctgctgctctccggagccctcgcctactgcctggccctccagctgtatgtgcggcgccgaaagaagctacccagtgtcctgctcttcaagaagcccagccccttcatcttcatcagccagcgtccctccccagagacccaagacaccatccacccgcttgatgaggaggcctttttgaaggtgtccccagagctgaagaacttggacctgcacggcagcacagacagtggctttggcagcaccaagccatccctgcagactgaagagccccagttcctcctccctgaccctcacccccaggctgacagaacgctgggaaacagggagccccctgtgctgggggacagctgcagtagtggcagcagcaatagcacagacagcgggatctgcctgcaggagcccagcctgagccccagcacagggcccacctgggagcaacaggtggggagcaacagcaggggccaggatgacagtggcattgacttagttcaaaactctgagggccgggctggggacacacagggtggctcggccttgggccaccacagtcccccggagcctgaggtgcctggggaagaagacccagctgctgtggcattccagggttacctgaggcagaccagatgtgctgaagagaaggcaaccaagacaggctgcctggaggaagaatcgcccttgacagatggccttggccccaaattcgggagatgcctggttgatgaggcaggcttgcatccaccagccctggccaagggctatttgaaacaggatcctctagaaatgactctggcttcctcaggggccccaacgggacagtggaaccagcccactgaggaatggtcactcctggccttgagcagctgcagtgacctgggaatatctgactggagctttgcccatgaccttgcccctctaggctgtgtggcagccccaggtggtctcctgggcagctttaactcagacctggtcaccctgcccctcatctctagcctgcagtcaagtgagtga

SEQ ID NO: 1066 - DNA, 555 bp, Homo sapiens
atggtgcggaagcttaagttccacgagcagaagctgctgaagcaggtggacttcctgaactgggaggtcaccgaccacaacctgcacgagctgcgcgtgctgcggcgttaccggctgcagcggcgggaggactacacgcgctacaaccagctgagccgtgccgtgcgtgagctggcgcggcgcctgcgcgacctgcccgaacgcgaccagttccgcgtgcgcgcttcggccgcgctgctggacaagctgtatgctctcggcttggtgcccacgcgcggttcgctggagctctgcgacttcgtcacggcctcgtccttctgccgccgccgcctccccaccgtgctcctcaagctgcgcatggcgcagcaccttcaggctgccgtggcctttgtggagcaagggcacgtacgcgtgggccctgacgtggttaccgaccccgccttccttgtcacgcgcagcatggaggactttgtcacttgggtggactcgtccaagatcaagcggcacgtgctagagtacaatgaggagcgcgatgacttcgatctggaagcctag

SEQ ID NO: 1067 - DNA, 978 bp, Homo sapiens
atgcccatcactcggatgcgcatgagaccctggctagagatgcagattaattccaaccaaatcccggggctcatctggattaataaagaggagatgatcttccagatcccatggaagcatgctgccaagcatggctgggacatcaacaaggatgcctgtttgttccggagctgggccattcacacaggccgatacaaagcaggggaaaaggagccagatcccaagacgtggaaggccaactttcgctgtgccatgaactccctgccagatatcgaggaggtgaaagaccagagcaggaacaagggcagctcagctgtgcgagtgtaccggatgcttccacctctcaccaagaaccagagaaaagaaagaaagtcgaagtccagccgagatgctaagagcaaggccaagaggaagtcatgtggggattccagccctgataccttctctgatggactcagcagctccactctgcctgatgaccacagcagctacacagttccaggctacatgcaggacttggaggtggagcaggccctgactccagcactgtcgccatgtgctgtcagcagcactctccccgactggcacatcccagtggaagttgtgccggacagcaccagtgatctgtacaacttccaggtgtcacccatgccctccacctctgaagctacaacagatgaggatgaggaagggaaattacctgaggacatcatgaagctcttggagcagtcggagtggcagccaacaaacgtggatgggaaggggtacctactcaatgaacctggagtccagcccacctctgtctatggagactttagctgtaaggaggagccagaaattgacagcccagggggggatattgggctgagtctacagcgtgtcttcacagatctgaagaacatggatgccacctggctggacagcctgctgaccccagtccggttgccctccatccaggccattccctgtgcaccgtag

SEQ ID NO: 1068 - DNA, 1281 bp, Homo sapiens
atgtgtgaccggaatggtggtcggcggcttcgacagtggctgatcgagcagattgacagtagcatgtatccaggactgatttgggagaatgaggagaagagcatgttccggatcccttggaaacacgctggcaagcaagattataatcaggaagtggatgcctccatttttaaggcctgggcagtttttaaagggaagtttaaagaaggggacaaagctgaaccagccacttggaagacgaggttacgctgtgctttgaataagagcccagattttgaggaagtgacggaccggtcccaactggacatttccgagccatacaaagtttaccgaattgttcctgaggaagagcaaaaatgcaaactaggcgtggcaactgctggctgcgtgaatgaagttacagagatggagtgcggtcgctctgaaatcgacgagctgatcaaggagccttctgtggacgattacatggggatgatcaaaaggagcccttccccgccggaggcctgtcggagtcagctccttccagactggtgggcgcagcagcccagcacaggcgtgccgctggtgacggggtacaccacctacgacgcgcaccattcagcattctcccagatggtgatcagcttctactatgggggcaagctggtgggccaggccaccaccacctgccccgagggctgccgcctgtccctgagccagcctgggctgcccggcaccaagctgtatgggcccgagggcctggagctggtgcgcttcccgccggccgacgccatccccagcgagcgacagaggcaggtgacgcggaagctgttcgggcacctggagcgcggggtgctgctgcacagcagccggcagggcgtgttcgtcaagcggctgtgccagggccgcgtgttctgcagcggcaacgccgtggtgtgcaaaggcaggcccaacaagctggagcgtgatgaggtggtccaggtcttcgacaccagccagttcttccgagagctgcagcagttctataacagccagggccggcttcctgacggcagggtggtgctgtgctttggggaagagtttccggatatggcccccttgcgctccaaactcattctcgtgcagattgagcagctgtatgtccggcaactggcagaagaggctgggaagagctgtggagccggctctgtgatgcaggcccccgaggagccgccgccagaccaggtcttccggatgtttccagatatttgtgcctcacaccagagatcatttttcagagaaaaccaacagatcaccgtctaa

SEQ ID NO: 1069 - DNA, 1044 bp, Homo sapiens
atgtgcactaaaatggaacagcccttctaccacgacgactcatacacagctacgggatacggccgggcccctggtggcctctctctacacgactacaaactcctgaaaccgagcctggcggtcaacctggccgacccctaccggagtctcaaagcgcctggggctcgcggacccggcccagagggcggcggtggcggcagctacttttctggtcagggctcggacaccggcgcgtctctcaagctcgcctcttcggagctggaacgcctgattgtccccaacagcaacggcgtgatcacgacgacgcctacacccccgggacagtacttttacccccgcgggggtggcagcggtggaggtgcagggggcgcagggggcggcgtcaccgaggagcaggagggcttcgccgacggctttgtcaaagccctggacgatctgcacaagatgaaccacgtgacaccccccaacgtgtccctgggcgctaccggggggcccccggctgggcccgggggcgtctacgccggcccggagccacctcccgtttacaccaacctcagcagctactccccagcctctgcgtcctcgggaggcgccggggctgccgtcgggaccgggagctcgtacccgacgaccaccatcagctacctcccacacgcgccgcccttcgccggtggccacccggcgcagctgggcttgggccgcggcgcctccaccttcaaggaggaaccgcagaccgtgccggaggcgcgcagccgggacgccacgccgccggtgtcccccatcaacatggaagaccaagagcgcatcaaagtggagcgcaagcggctgcggaaccggctggcggccaccaagtgccggaagcggaagctggagcgcatcgcgcgcctggaggacaaggtgaagacgctcaaggccgagaacgcggggctgtcgagtaccgccggcctcctccgggagcaggtggcccagctcaaacagaaggtcatgacccacgtcagcaacggctgtcagctgctgcttggggtcaagggacacgccttctga

SEQ ID NO: 1070 - DNA, 5313 bp, Homo sapiens
atgtcgggagcctcagtgaaggtggctgtccgggtaaggcccttcaattctcgagagaccagcaaggaatccaaatgcatcattcagatgcaaggcaactcgaccagtattattaacccaaagaatccaaaggaagctccaaagtccttcagcttcgactattcctactggtctcatacctcacccgaagatccctgttttgcatctcaaaaccgtgtgtacaatgacattggcaaggaaatgctcttacacgcctttgagggatataatgtctgtatttttgcctatgggcagactggtgctggaaaatcttatacaatgatgggtaaacaagaagaaagccaggctggcatcattccacagttatgtgaagaactttttgagaaaatcaatgacaactgtaatgaagaaatgtcttactctgtagaggtgagctacatggaaatttactgtgaaagagtacgagatttgctgaatccaaaaaacaagggtaatttgcgtgtgcgtgaacacccacttcttggaccctatgtggaggatctgtccaagttggcagttacttcctacacagacattgctgacctcatggatgctgggaacaaagccaggacagtggcagctacaaacatgaatgaaacaagtagccgttcccacgctgtgtttacgattgttttcacccagaagaaacacgataatgagaccaacctttccactgagaaggtcagtaaaatcagcttggtggatctagcaggaagtgaacgagctgattcaactggtgccaaagggactcgattaaaggaaggagcaaatattaataagtctcttacaactttgggcaaagtcatttcagccttggccgaggtgagtaaaaagaagaagaaaacagattttattccctacagggattctgtacttacttggctccttcgagaaaatttaggtggcaattctcggactgcaatggttgctgctctgagccccgcggatatcaactacgatgagactttgagcactctgagatatgcagatcgtgcaaaacaaattaaatgcaatgctgttatcaatgaggaccccaatgccaaactggttcgtgaattaaaggaggaggtgacacggctgaaggaccttcttcgtgctcagggcctgggagatattattgatacatccatggggtccctcacttcatccccatcttcctgctcactcagtagtcaggtgggcttgacgtctgtgaccagtattcaagagaggatcatgtctacacctggaggagaggaagctattgaacgtttaaaggaatcagagaagatcattgctgagttgaatgaaacttgggaagagaagcttcgtaaaacagaggccatcagaatggagagagaggctttgttggctgagatgggagttgccattcgggaagatggaggaaccctaggggttttctcacctaaaaagaccccacatcttgttaacctcaatgaagacccactaatgtctgagtgcctactttattacatcaaagatggaattacaagggttggccaagcagatgctgagcggcgccaggacatagtgctgagcggggctcacattaaagaagagcattgtatcttccggagtgagagaagcaacagcggggaagttatcgtgaccttagagccctgtgagcgctcagaaacctacgtaaatggcaagagggtgtcccagcctgttcagctgcgctcaggaaaccgtatcatcatgggtaaaaaccatgttttccgctttaaccacccggaacaagcacgagctgagcgagagaagactccttctgctgagaccccctctgagcctgtggactggacatttgcccagagggagcttctggaaaaacaaggaattgatatgaaacaagagatggagaaaaggctacaggaaatggagatcttatacaaaaaggagaaggaagaagcagatcttcttttggagcagcagagactggactatgagagtaaattgcaggccttgcagaagcaggttgaaacccgatctctggctgcagaaacaactgaagaggaggaagaagaggaagaagttccttggacacagcatgaatttgagttggcccaatgggccttccggaaatggaagtctcatcagtttacttcattacgggacttactctggggcaatgccgtgtacctaaaggaggccaatgccatcagtgtggaactgaaaaagaaggtgcagtttcagtttgttctgctgactgacacactgtactcccctttgcctcctgaattacttcccactgagatggaaaaaactcatgaggacaggcctttccctcgcacagtggtagcagtagaagtccaggatttgaagaatggagcaacacactattggtctttggagaaactcaagcagaggctggatttgatgcgagagatgtatgatagggcaggggagatggcctccagtgcccaagacgaaagcgaaaccactgtgactggcagcgatcccttctatgatcggttccactggttcaaacttgtggggagctcccccattttccacggctgtgtgaacgagcgccttgccgaccgcacaccctcccccactttttccacggccgattccgacatcactgagctggctgacgagcagcaagatgagatggaggattttgatgatgaggcattcgtggatgacgccggctctgacgcagggacggaggagggatcagatctcttcagtgacgggcatgacccgttttacgaccgatccccttggttcattttagtgggaagggcatttgtttacctgagcaatctgctgtatcccgtgcccctgatccacagggtggccatcgtcagtgagaaaggtgaagtgcggggatttctgcgtgtggctgtacaggccatcgcagcggatgaagaagctcctgattatggctctggaattcgacagtcaggaacagctaaaatatcttttgataatgaatactttaatcagagtgacttttcgtctgttgcaatgactcgttctggtctgtccttggaggagttgaggattgtggaaggacagggtcagagttctgaggtcatcactcctccagaagaaatcagtcgaattaatgacttggatttgaagtcaagcactttgctggatggtaagatggtaatggaagggttttctgaagagattggcaaccacctgaaactgggcagtgccttcactttccgagtaacagtgttgcaggccagtggaatcctcccagagtatgcagatatcttctgtcagttcaactttttgcatcgccatgatgaagcattctccacggagcccctcaaaaacaatggcagaggaagtcccctggccttttatcatgtgcagaatattgcagtggagatcactgaatcatttgtggattacatcaaaaccaagcctattgtatttgaagtctttgggcattatcagcagcacccacttcatctgcaaggacaggagcttaacagtccgcctcagccgtgccgccgattcttccctccacccatgccactgtccaagccagttccagccaccaagttaaacacgatgagcaaaaccagccttggccagagcatgagcaagtatgacctcctggtttggtttgagatcagtgaactggagcctacaggagagtatatcccagctgtggttgaccacacagcaggcttgccttgccaggggacatttttgcttcatcagggcatccagcgaaggatcacagtgaccattatccatgagaaggggagcgagctccattggaaagatgttcgtgaactggtggtaggtcgtattcggaataagcctgaggtggatgaagctgcagttgatgccatcctctccctaaatattatttctgccaagtacctgaagtcttcccacaactctagcaggaccttctaccgctttgaggctgtgtgggatagctctctgcataactcccttcttctgaaccgagtgacaccctatggagaaaagatctacatgaccttgtcggcctacctagagctggatcattgcatccagccggctgtcatcaccaaggatgtgtgcatggtcttctactcccgagatgccaagatctcaccaccacgctctctgcgtagcctctttggcagcggctactcaaagtcaccagattcgaatcgagtcactggcatttacgaactcagcttatgcaaaatgtcagacacaggtagtccaggtatgcagagaaggagaagaaaaatcttagatacgtcagtggcatatgtgcggggagaagagaacttagcaggctggcggccccgtggagacagcctcatccttgagcaccagtgggagctggagaagctggagctcctacatgaggtggaaaaaacccgccactttttgctgctgcgtgagagacttggtgacagcatccccaaatccctgagcgactcgttatcccccagcctcagcagtgggaccctcagcacctccaccagtatctcctctcagatctcaaccactacctttgaaagcgccatcacacctagcgagagcagtggctatgattcaggagacatcgaaagcctggtggaccgagagaaagagctggctaccaagtgcctgcaacttctcacccacactttcaacagagaattcagccaggtgcacggcagcgtcagtgactgtaagttgtctgatatctctccaattggacgggatccctctgagtccagtttcagcagtgccaccctcactccctcctccacctgtccctctctggtagactctaggagcaactctctggatcagaagaccccagaagccaattcccgggcctctagtccctgcccagaatttgaacagtttcagattgtcccagctgtggaaacaccatatttggcccgagcaggaaaaaacgaatttctcaatcttgttccagatattgaagaaattagaccaagctcagtggtctctaagaaaggataccttcatttcaaggagcctctttacagtaactgggctaaacattttgttgtcgtccgtcggccttatgtcttcatctataacagtgacaaagaccctgtggagcgtggaatcattaacctgtccacagcacaggtggagtacagtgaggaccagcaggccatggtgaagacaccaaacacctttgctgtctgcacaaagcaccgtggggtccttttgcaggccctcaatgacaaagacatgaacgactggttgtatgccttcaacccacttctagctggcacaatacggtcaaagctttcccgcagatgcccgagccagtcgaaatactaa

SEQ ID NO: 1071 - DNA, 1560 bp, Homo sapiens; identical to SEQ ID NO: 344

SEQ ID NO: 1072 - DNA, 999 bp, Homo sapiens
atggcaactctaaaggatcagctgatttataatcttctaaaggaagaacagaccccccagaataagattacagttgttggggttggtgctgttggcatggcctgtgccatcagtatcttaatgaaggacttggcagatgaacttgctcttgttgatgtcatcgaagacaaattgaagggagagatgatggatctccaacatggcagccttttccttagaacaccaaagattgtctctggcaaagactataatgtaactgcaaactccaagctggtcattatcacggctggggcacgtcagcaagagggagaaagccgtcttaatttggtccagcgtaacgtgaacatctttaaattcatcattcctaatgttgtaaaatacagcccgaactgcaagttgcttattgtttcaaatccagtggatatcttgacctacgtggcttggaagataagtggttttcccaaaaaccgtgttattggaagcggttgcaatctggattcagcccgattccgttacctaatgggggaaaggctgggagttcacccattaagctgtcatgggtgggtccttggggaacatggagattccagtgtgcctgtatggagtggaatgaatgttgctggtgtctctctgaagactctgcacccagatttagggactgataaagataaggaacagtggaaagaggttcacaagcaggtggttgagagtgcttatgaggtgatcaaactcaaaggctacacatcctgggctattggactctctgtagcagatttggcagagagtataatgaagaatcttaggcgggtgcacccagtttccaccatgattaagggtctttacggaataaaggatgatgtcttccttagtgttccttgcattttgggacagaatggaatctcagaccttgtgaaggtgactctgacttctgaggaagaggcccgtttgaagaagagtgcagatacactttgggggatccaaaaggagctgcaattttaa

SEQ ID NO: 1073 - DNA, 1968 bp, Homo sapiens
atggtggcaccaaagagtcacacagatgactgggctcctgggcctttctccagtaagccacagaggagtcagctgcaaatattctcttctgttctacagacctctctcctcttcctgctcatgggactaagagcctctggaaaggactcagccccaacagtggtgtcagggatcctagggggttccgtgactctccccctaaacatctcagtagacacagagattgagaacgtcatctggattggtcccaaaaatgctcttgctttcgcacgtcccaaagaaaatgtaaccattatggtcaaaagctacctgggccgactagacatcaccaagtggagttactccctgtgcatcagcaatctgactctgaatgatgcaggatcctacaaagcccagataaaccaaaggaattttgaagtcaccactgaggaggaattcaccctgttcgtctatgagcagctgcaggagccccaagtcaccatgaagtctgtgaaggtgtctgagaacttctcctgtaacatcactctaatgtgctccgtgaagggggcagagaaaagtgttctgtacagctggaccccaagggaaccccatgcttctgagtccaatggaggctccattcttaccgtctcccgaacaccatgtgacccagacctgccatacatctgcacagcccagaaccccgtcagccagagaagctccctccctgtccatgttgggcagttctgtacagatccaggagcctccagaggaggaacaacgggggagactgtggtaggggtcctgggagagccagtcaccctgccacttgcactcccagcctgccgggacacagagaaggttgtctggttgtttaacacatccatcattagcaaagagagggaagaagcagcaacggcagatccactcattaaatccagggatccttacaagaacagggtgtgggtctccagccaggactgctccctgaagatcagccagctgaagatagaggacgccggcccctaccatgcctacgtgtgctcagaggcctccagcgtcaccagcatgacacatgtcaccctgctcatctaccgcaggctgaggaagcccaaaatcacgtggagcctcaggcacagtgaggatggcatctgcaggatcagcctgacctgctccgtggaggacgggggaaacactgtcatgtacacatggaccccgctgcagaaggaagctgttgtgtcccaaggggaatcacacctcaatgtctcatggagaagcagtgaaaatcaccccaacctcacatgcacagccagcaaccctgtcagcaggagttcccaccagtttctttctgagaacatctgttcaggacctgagagaaacacaaagctttggattgggttgttcctgatggtttgccttctgtgcgttgggatcttcagctggtgcatttggaagcgaaaaggacggtgttcagtcccagccttctgttccagccaagctgaggccccagcggatacaccagaacccacagctggccacacgctatactctgtgctctcccaaggatatgagaagctggacactcccctcaggcctgccaggcaacagcctacacccacctcagacagcagctctgacagcaacctcacaactgaggaggatgaggacaggcctgaggtgcacaagcccatcagtggaagatatgaggtatttgaccaggtcactcaggagggcgctggacatgacccagcccctgagggccaagcagactatgatcccgtcactccatatgtcacggaagttgagtctgtggttggagagaacaccatgtatgcacaagtgttcaacttacagggaaagaccccagtttctcagaaggaagagagctcagccacaatctactgctccatacggaaacctcaggtggtgccaccaccacaacagaatgatcttgagattcctgaaagtcctacctatgaaaatttcacctga

SEQ ID NO: 1074 - DNA, 1161 bp, Homo sapiens
atggcggccgtggagacgcgggtgtgcgagacagacggctgcagcagtgaggccaagctccagtgtcccacttgcatcaagctgggcatccagggctcgtacttctgctcgcaggaatgttttaaaggaagttgggctactcacaagttactacataagaaagcaaaagatgaaaaggcgaagcgagaagtgtcttcctggactgtggaaggtgatattaatactgacccatgggcaggttatcgatatactggtaaactcagaccacattatccactgatgccaacaaggccagtgccaagttatattcaaagaccagattatgctgatcatcccttaggaatgtctgaatctgaacaggctcttaaaggtacttctcagattaaattactctcatctgaagatatagaagggatgcgacttgtatgtaggcttgctagagaagttttggatgttgctgccggcatgattaaaccaggtgtaactactgaagaaatagatcacgctgtacacttagcatgtattgcaagaaattgctacccttctcccctgaattattataatttcccaaagtcttgttgtacctcagtgaatgaagtcatttgccatggaataccagacagaaggcccttacaagaaggtgacattgttaatgtggatatcactctttatcgcaatggttatcatggggacctgaatgagacattttttgttggagaagtggatgatggagcacggaaacttgttcagaccacatatgagtgcctgatgcaagccattgatgcagtgaagcctggtgttcggtacagagaattgggaaacattatccagaagcatgcccaagcaaatgggttttcagttgttcgaagctattgtgggcatggaatccacaagctttttcatacagctcccaatgtaccccactatgctaaaaataaagcagttggagtgatgaagtcgggccatgtatttacaattgagccaatgatttgtgaaggcggatggcaggatgaaacctggccagatggttggactgcggtgacaagagacggaaagcggtctgctcagtttgagcacaccctcctggtcacagacactggctgtgaaatcctaacccggcgacttgacagtgcacggcctcacttcatgtctcaattttaa

SEQ ID NO: 1075 - DNA, 2751 bp, Homo sapiens
atggtgcagaaggagagtcaagcgacgttggaggagcgggagagcgagctcagctccaaccctgccgcctctgcgggggcatcgctggagccgccggcagctccggcacccggagaagacaaccccgccggggctgggggagcggcggtggccggggctgcaggaggggctcggcggttcctctgcggtgtggtggaaggattttatggaagaccttgggttatggaacagagaaaagaactctttagaaggctccagaaatgggaattaaatacatacttgtatgccccaaaagatgactacaaacataggatgttttggcgagagatgtattcagtggaggaagctgagcaacttatgactctcatctctgctgcacgagaatatgagatagagttcatctatgcgatctcacctggattggatatcactttttctaaccccaaggaagtatccacattgaaacgtaaattggaccaggtttctcagtttgggtgcagatcatttgctttgctttttgatgatatagaccataatatgtgtgcagcagacaaagaggtattcagttcttttgctcatgcccaagtctccatcacaaatgaaatctatcagtacctaggagagccagaaactttcctcttctgtcccacagaatactgtggcactttctgttatccaaatgtgtctcagtctccatatttaaggactgtgggtgaaaagcttctacctggaattgaagtgctttggacaggtcccaaagttgtttctaaagaaattccagtagagtccatcgaagaggtttctaagattattaagagagctccagtaatctgggataacattcatgctaatgattatgatcagaagagactgtttctgggcccgtacaaaggaagatccacagaactcatcccacggttaaaaggagtcctcactaatccaaattgtgaatttgaagccaactacgttgctatccacacccttgccacctggtacaaatcaaacatgaatggagtgagaaaagatgtagtgatgactgacagtgaagatagtactgtgtccatccagataaaattagaaaatgaaggcagtgatgaagatattgaaactgatgtactctatagtccacagatggctctaaagctagcattaacagaatggttgcaagagtttggtgtgcctcatcaatacagcagtaggcaagttgcacacagtggagctaaagcaagtgtagttgatgggactcctttagttgcagcaccctctttaaatgccacaaccgtagtaacaacagtttatcaggagcccattatgagccagggagcagccttgagtggtgagcctactactctgaccaaggaagaagaaaagaaacagcctgatgaagaacccatggacatggtggtggaaaaacaagaagaaacggaccacaagaatgacaatcaaatactgagtgaaattgttgaagcgaaaatggcagaggaattgaaaccaatggacactgataaagagagcatagctgaatcaaaatccccagagatgtccatgcaagaagattgtattagtgacattgcccccatgcaaactgatgaacagacaaacaaggagcagtttgtgccaggtccaaatgaaaagcctttgtacactgcggaaccagtgaccctggaggatttgcagttacttgctgatctattctaccttccttacgagcatggacccaaaggagcacagatgttacgggaatttcaatggcttcgagcaaatagtagtgttgtcagtgtcaattgcaaaggaaaagactctgaaaaaattgaagaatggcggtcacgagcagccaagtttgaagagatgtgtggactagtgatgggaatgttcactcggctctccaattgtgccaacaggacaattctttatgacatgtactcctatgtttgggatatcaagagtataatgtctatggtgaagtcttttgtacagtggttagggtgtcgtagtcattcttcagcacaattcttaattggagaccaagaaccctgggcctttagaggtggtctagcaggagagttccagcgtttgctgccaattgatggggcaaatgatctcttttttcagccacctccactgactcctacctccaaagtttatactatcagaccttattttcctaaggatgaggcatccgtgtacaagatttgcagagaaatgtatgacgatggagtgggtttaccctttcaaagtcagcctgatcttattggagacaagttagtaggagggctgctttccctcagcctggattactgctttgtcctagaagatgaagatggcatatgtggttatgccttgggcactgtagatgtgaccccctttattaaaaaatgtaaaatttcctggatccccttcatgcaggagaagtataccaagccaaatggtgacaaggaactctctgaggctgagaaaataatgttgagtttccatgaagaacaggaagtactgccagaaactttccttgctaatttcccttctctgataaagatggacattcacaaaaaagtaactgacccaagtgtggccaaaagcatgatggcttgcctcctgtcttcactgaaggctaatggctcccggggagctttctgtgaagtgagaccagatgataaaagaattctggaattttacagcaagttaggatgttttgaaattgcaaaaatggaaggatttccaaaggatgtggttatacttggtcggagcctgtga

SEQ ID NO: 1076 - DNA, 3084 bp, Homo sapiens
atggtctctagcgaccggcccgtgtcactggaggacgaggtctcccatagtatgaaggagatgattggaggctgttgcgtttgctcagacgagagaggctgggccgagaacccgctggtttattgcgacgggcacggctgcagcgtcgcggtgcatcaagcttgctatggcattgttcaagtacccactggaccgtggttttgcaggaaatgtgaatctcaggagagagcagccagagtgagatgtgaactttgtccccataaggatggagctttaaaaagaacagataatgggggttgggcccatgtggtttgtgccctgtatattccagaggtacaatttgccaatgtttccacaatggaaccaattgttttacagtctgttccgcatgatcgttataataagacttgctacatttgtgatgaacaaggaagagaaagcaaagcagccactggtgcttgcatgacatgtaataaacatggatgtcgacaggctttccatgtaacatgcgctcagtttgccggactgctttgtgaagaagaaggtaatggtgccgataatgtccaatactgtggctactgtaaataccattttagtaagctgaaaaagagcaaacggggatctaataggtcatatgatcaaagtttaagtgattcttcctctcactctcaggataaacatcatgagaaagagaaaaaaaaatataaagagaaggacaaacacaaacagaaacacaagaagcagccagaaccatcacctgcattggttccatccttgactgttactacagaaaaaacttatacaagcactagcaacaactctatatctggatcattgaagcgcttggaagatactactgcacgatttacaaatgcaaatttccaggaagtctctgcacacacctctagtggaaaagatgtttcagagactagagggtcagagggcaaagggaagaaatcttcagctcacagctcaggtcaaaggggaagaaagcctggtggtggaagaaatccaggaacaactgtgtcagcagctagcccttttcctcaaggcagtttttcaggaactccaggcagtgtaaagtcatcttctggaagttcagtgcagtctccccaggatttcctgagctttacagactcagatctgcgtaatgacagttactctcactcccaacagtcatcagcaaccaaagatgtacataaaggagagtctggaagccaggaagggggggtaaatagttttagtaccttaattggcctcccttcaacctcagctgttacttcacagcctaaaagctttgaaaattcacctggagatttgggtaattccagccttcctacagcaggatataagcgggctcaaacttctggcatagaagaagaaactgtaaaggaaaagaaaaggaaaggaaataaacaaagtaagcatgggcctggcagacccaaaggaaacaaaaatcaagagaatgtttctcatctctcagtttcttctgcttcaccaacatcatctgtagcatcagctgcaggaagcataacaagctctagtctgcagaaatctcctacattgctcaggaatggaagtttacagagcctcagtgttggctcatctccagttggttcagaaatttccatgcagtatcggcatgatggagcttgcccaacaactacgttctcagagttgctgaatgcaatacacaacgacagaggtgacagttctacactaacaaagcaagaacttaaattcataggtatttataacagcaatgatgtagcagtatcgtttccaaatgtagtatctggctcgggatctagtactcctgtctccagctctcacttacctcagcagtcttctgggcatttgcaacaagtaggagcgctctctccctcagctgtgtcatctgcagcccctgctgttgctacaactcaggcaaatactctatctggatcttctctcagtcaggcaccatctcatatgtatggcaatagatcaaattcatcaatggcagctcttatagctcagtctgaaaacaatcaaacagatcaagatcttggagacaatagccgcaacctagttggcagaggaagctcaccccgaggaagtctctcgccacgatcccctgtaagcagcttacagattcgctatgatcaaccaggcaacagcagtttggaaaatctgcctccagtagcagccagcatagaacagcttttggagaggcagtggagtgaaggacagcaatttttactagaacagggtactcctagtgacattttaggaatgctgaagtcattacaccaacttcaagttgaaaaccgaagattagaggaacaaattaaaaacttgactgccaaaaaggaacggcttcagttattgaatgcacagctttcagtgccttttccaacaataacagcaaatcctagtccgtctcatcaaatacacacattttcagcacagactgctcctactactgattccttgaacagcagtaagagccctcatataggaaacagctttttacctgataattctcttcctgtattaaatcaggacttaacctccagtggacaaagtaccagcagctcatcagctctttctaccccacctcctgctgggcagagtccggctcaacaaggctcaggagtgagtggagttcagcaggtcaatggcgtgacagtgggggcactagctagtggaatgcagcctgtaacttccaccattcctgccgtgtctgcagtgggtggaataattggagctttgccaggtaaccaactggcaattaatggcattgtaggagctttaaatggggttatgcagactcctgtcacaatgtcccagaaccctacccctctcacccacacaaccgtaccacctaatgcaacacatccaatgccagctacactgactaacagtgcctcaggactaggattactttctgaccagcaacgacaaatacttattcatcaacagcagtttcagcagttgttaaattctcaacagctcacaccagtacacaggcacccccacttcacacagctaccaccaacccatttctcaccatccatggagataatgcaagtcagaaagtag

SEQ ID NO: 1077 - DNA, 930 bp, Homo sapiens
atgcgacccgaccgcgctgaggctccaggaccgcccgccatggctgcaggaggtcccggcgcggggtctgcggccccggtctcctccacatcctcccttcccctggctgctctcaacatgcgagtgcggcgccgcctgtctctgttcttgaacgtgcggacacaggtggcggccgactggaccgcgctggcggaggagatggactttgagtacttggagatccggcaactggagacacaagcggaccccactggcaggctgctggacgcctggcagggacgccctggcgcctctgtaggccgactgctcgagctgcttaccaagctgggccgcgacgacgtgctgctggagctgggacccagcattgaggaggattgccaaaagtatatcttgaagcagcagcaggaggaggctgagaagcctttacaggtggccgctgtagacagcagtgtcccacggacagcagagctggcgggcatcaccacacttgatgaccccctggggcatatgcctgagcgtttcgatgccttcatctgctattgccccagcgacatccagtttgtgcaggagatgatccggcaactggaacagacaaactatcgactgaagttgtgtgtgtctgaccgcgatgtcctgcctggcacctgtgtctggtctattgctagtgagctcatcgaaaagaggtgccgccggatggtggtggttgtctctgatgattacctgcagagcaaggaatgtgacttccagaccaaatttgcactcagcctctctccaggtgcccatcagaagcgactgatccccatcaagtacaaggcaatgaagaaagagttccccagcatcctgaggttcatcactgtctgcgactacaccaacccctgcaccaaatcttggttctggactcgccttgccaaggccttgtccctgccctga

SEQ ID NO: 1078 - DNA, 1389 bp, Homo sapiens
atgcagctgagaaaaatgcagaccgtcaaaaaggagcaggcgtctcttgatgccagtagcaatgtggacaagatgatggtccttaattctgctttaacggaagtgtcagaagactccacaacaggtgaggagctgcttctcagtgaaggaagtgtggggaagaacaaatcttctgcatgtcggaggaaacgggaattcattcctgatgaaaagaaagatgctatgtattgggaaaaaaggcggaaaaataatgaagctgccaaaagatctcgtgagaagcgtcgactgaatgacctggttttagagaacaaactaattgcactgggagaagaaaacgccactttaaaagctgagctgctttcactaaaattaaagtttggtttaattagctccacagcatatgctcaagagattcagaaactcagtaattctacagctgtgtactttcaagattaccagacttccaaatccaatgtgagttcatttgtggacgagcacgaaccctcgatggtgtcaagtagttgtatttctgtcattaaacactctccacaaagctcgctgtccgatgtttcagaagtgtcctcagtagaacacacgcaggagagctctgtgcagggaagctgcagaagtcctgaaaacaagttccagattatcaagcaagagccgatggaattagagagctacacaagggagccaagagatgaccgaggctcttacacagcgtccatctatcaaaactatatggggaattctttctctgggtactcacactctcccccactactgcaagtcaaccgatcctccagcaactccccgagaacgtcggaaactgatgatggtgtggtaggaaagtcatctgatggagaagacgagcaacaggtccccaagggccccatccattctccagttgaactcaagcatgtgcatgcaactgtggttaaagttccagaagtgaattcctctgccttgccacacaagctccggatcaaagccaaagccatgcagatcaaagtagaagcctttgataatgaatttgaggccacgcaaaaactttcctcacctattgacatgacatctaaaagacatttcgaactcgaaaagcatagtgccccaagtatggtacattcttctcttactcctttctcagtgcaagtgactaacattcaagattggtctctcaaatcggagcactggcatcaaaaagaactgagtggcaaaactcagaatagtttcaaaactggagttgttgaaatgaaagacagtggctacaaagtttctgacccagagaacttgtatttgaagcaggggatagcaaacttatctgcagaggttgtctcactcaagagacttatagccacacaaccaatctctgcttcagactctgggtaa

SEQ ID NO: 1079 - DNA, 954 bp, Homo sapiens
atgttccaggcggccgagcgcccccaggagtgggccatggagggcccccgcgacgggctgaagaaggagcggctactggacgaccgccacgacagcggcctggactccatgaaagacgaggagtacgagcagatggtcaaggagctgcaggagatccgcctcgagccgcaggaggtgccgcgcggctcggagccctggaagcagcagctcaccgaggacggggactcgttcctgcacttggccatcatccatgaagaaaaggcactgaccatggaagtgatccgccaggtgaagggagacctggccttcctcaacttccagaacaacctgcagcagactccactccacttggctgtgatcaccaaccagccagaaattgctgaggcacttctgggagctggctgtgatcctgagctccgagactttcgaggaaatacccccctacaccttgcctgtgagcagggctgcctggccagcgtgggagtcctgactcagtcctgcaccaccccgcacctccactccatcctgaaggctaccaactacaatggccacacgtgtctacacttagcctctatccatggctacctgggcatcgtggagcttttggtgtccttgggtgctgatgtcaatgctcaggagccctgtaatggccggactgcccttcacctcgcagtggacctgcaaaatcctgacctggtgtcactcctgttgaagtgtggggctgatgtcaacagagttacctaccagggctattctccctaccagctcacctggggccgcccaagcacccggatacagcagcagctgggccagctgacactagaaaaccttcagatgctgccagagagtgaggatgaggagagctatgacacagagtcagagttcacggagttcacagaggacgagctgccctatgatgactgtgtgtttggaggccagcgtctgacgttatga

SEQ ID NO: 1080 - DNA, 906 bp, Homo sapiens; identical to SEQ ID NO: 408

SEQ ID NO: 1081 - DNA, 1923 bp, Homo sapiens; identical to SEQ ID NO: 413

SEQ ID NO: 1082 - DNA, 4311 bp, Homo sapiens
atgcttcacctgtccgcagctccgcccgccccacccccggaagtgacggcgaccgcgcggccctgcctttgttccgttgggcgtcgcggcgacggcgggaagatggcggcggcgggagccctggaacggagcttcgtggagctaagcggagctgagcgcgaaaggccgaggcactttcgggaattcacagtctgcagcattgggactgcaaatgccgtggctggcgccgtaaaatacagtgaaagcgcgggaggcttttactacgtggagagtggcaagttgttctccgtaaccagaaacaggttcattcattggaagacctctggagatacattggagctgatggaggagtcactggacataaatctgttgaataatgccattcgcctaaaattccaaaattgcagtgttttacctggaggggtttatgtctctgagactcagaatcgtgtgataatcttgatgttaaccaatcaaacagtgcacaggttacttttaccacacccctcccggatgtataggagtgagttggtagttgacagtcagatgcagtcaatattcactgacattggaaaagttgatttcacagatccttgcaactatcagttaattccagcagtacctggaatatctcctaattccaccgcctctacagcctggctcagcagtgatggggaggccctgtttgccttaccatgtgcttctgggggaatctttgttcttaagctacctccttatgacatacctggtatggtgtcagtcgtggaactgaaacagagttcagtaatgcaacgattgcttacaggctggatgccaacagctatcaggggtgaccagtcgccttcagatcgtcccctcagtcttgctgttcattgtgtggagcatgatgccttcatctttgctttgtgtcaggatcataaactacgaatgtggtcttacaaggagcaaatgtgcctaatggtagctgacatgctggagtatgtccctgtgaagaaagaccttcggcttactgctggaactggacacaaattacggcttgcttattcccccaccatgggactctacctggggatatacatgcatgcaccaaaacgaggacagttctgcattttccagttggtgagcactgagagtaatcgctatagtctcgatcatatttcttcactgttcacttctcaggagacactgattgactttgccttaacttccacggatatctgggccctgtggcatgatgctgagaaccaaacagtagtgaaatacatcaactttgaacataatgttgcaggtcagtggaatccagtttttatgcagcctctgccagaggaagagattgtcatcagagatgatcaagaccccagagagatgtatctgcaaagtctttttacaccaggacaattcacaaatgaagctttatgtaaggctttacagattttctgccgaggaactgagaggaatttggatctttcctggagtgaactgaagaaagaagttactttagctgttgaaaatgagcttcaaggaagtgtaacagagtatgaattctcccaggaggagtttcgaaatttacaacaagaattctggtgcaagttctatgcctgttgtcttcagtatcaagaagccctctctcaccctcttgccctacatttgaatccacacacaaacatggtgtgcctgctgaaaaaagggtacctgtctttccttattccctcatccttagtggatcatttgtatctcctgccttatgagaaccttttgacagaagatgagacaaccatatctgatgatgtggacatcgctcgggatgtcatatgtcttataaaatgcctccggctgattgaagagtcagtaactgtggatatgtcagttataatggaaatgagttgttataacctacagtctccggaaaaggctgcagagcagattctggaagatatgatcactattgatgtagaaaatgtgatggaggatatttgtagtaaactgcaagagattaggaacccaatccatgcaattggactacttatacgggaaatggattatgaaacagaagtggaaatggaaaagggattcaatccagctcagcctttgaatattcgaatgaatcttacccagctctatggtagtaacacagcagggtatattgtgtgcagaggggtgcataaaatcgccagtactcgtttcctgatctgcagagatcttttgatcttacagcagctgttaatgaggcttggagatgctgtgatttggggaactggtcagctctttcaagctcagcaagacctactacatcgaacagctcccctactcttatcttattacctcattaaatggggaagtgagtgcttggcaactgatgttccacttgacacactggagtctaatctccaacacttatcagtactggaattaacagactctggtgctttaatggcaaataggtttgtatctagtcctcagactattgtggagttattcttccaagaagttgcaagaaaacacattatatctcacctcttctctcagccaaaggcacctctgagccaaactggattgaattggcctgaaatgattactgcaattaccagttatttattgcagcttttatggcctagcaatcctggttgtctctttctagaatgtttgatgggaaattgccaatatgtacaattgcaggattatattcaactgctacatccctggtgtcaagtcaatgttggttcctgtcgatttatgctgggaaggtgttacctagttacaggagaaggacagaaggctctggaatgtttttgtcaggcagcatctgaagtaggcaaagaggaattcttggatcgcttgattcgctcagaggatggggagatcgtgtctacccccaggctgcagtattatgacaaggttttacgactactagatgtcattggtttgcctgaactggttattcagttggctacatcagccataactgaagcaggtgatgactggaaaagtcaggctactctaaggacatgtattttcaaacatcatttggatttgggtcacaatagccaagcatatgaagccttaacccaaattcctgattccagcaggcaattagattgtttacggcagttggtggtagttctttgtgaacgctcacagctacaggatcttgtagagtttccctatgtgaatctgcataatgaggttgtgggaataattgagtcacgtgctagagctgtggaccttatgactcacaattactatgaacttctgtatgcctttcacatctatcgccacaattaccgcaaggctggcacagtgatgtttgagtatggaatgcggcttggcagagaagttcgaactctccggggacttgagaaacaaggcaactgttatctggctgctctcaattgtttacgacttattcgtccagaatatgcgtggattgtgcagccagtgtctggtgcagtgtatgatcgccctggagcatcccctaagaggaatcatgatggagaatgcacagctgcccccacaaatcgacaaattgaaatcctggaactggaagatctggagaaagagtgttccttggctcgcatccgcctcactttggctcagcatgatccatcagcggttgcagttgctggaagttcatcagcagaggaaatggtcactctcttggttcaggcgggcctctttgacactgccatatcactctgtcagacttttaagcttcccttaacgccagtctttgaagggcttgccttcaaatgcatcaaattgcaatttggaggagaggcagcacaagcagaagcctgggcctggctagcagccaatcagctctcatctgtcatcactactaaggagtctagtgctacagatgaagcatggcgactattatccacttacctggagaggtacaaagtccagaataacttgtatcaccactgtgtaatcaacaagctcttgtctcatggagtgcctctgcctaattggcttataaacagttacaagaaggttgatgctgctgaattgcttcgtttatacttaaactatgaccttttagaagaagctgtggatttggtgtcagaatatgtggatgctgtattgggaaaaggacatcaatacttcggaattgagtttccactgtccgcaacagccccaatggtgtggcttccatactcctctattgatcagcttctccaagctctgggagagaacagtgccaacagtcacaacatcgcactgtcccagaaaatacttgacaaattggaggactaccagcaaaaagttgataaggcaacacgggatttattatatcgtcggaccttgtga

SEQ ID NO: 1083 - DNA, 1071 bp, Homo sapiens
atggatgccggtgtgactgaaagtggactaaatgtgactctcaccattcggcttcttatgcacggaaaggaagtaggaagcatcattgggaagaaaggggagtcggttaagaggatccgcgaggagagtggcgcgcggatcaacatctcggaggggaattgtccggagagaatcatcactctgaccggccccaccaatgccatctttaaggctttcgctatgatcatcgacaagctggaggaagatatcaacagctccatgaccaacagtaccgcggccagcaggcccccggtcaccctgaggctggtggtgccggccacccagtgcggctccctgattgggaaaggcgggtgtaagatcaaagagatccgcgagagtacgggggcgcaggtccaggtggcgggggatatgctgcccaactccaccgagcgggccatcaccatcgctggcgtgccgcagtctgtcaccgagtgtgtcaagcagatttgcctggtcatgctggagacgctctcccagtctccgcaagggagagtcatgaccattccgtaccagcccatgccggccagctccccagtcatctgcgcgggcggccaagatcggtgcagcgacgctgcgggctacccccatgccacccatgacctggagggaccacctctagatgcctactcgattcaaggacaacacaccatttctccgctcgatctggccaagctgaaccaggtggcaagacaacagtctcactttgccatgatgcacggcgggaccggattcgccggaattgactccagctctccagaggtgaaaggctattgggcaagtttggatgcatctactcaaaccacccatgaactcaccattccaaataacttaattggctgcataatcgggcgccaaggcgccaacattaatgagatccgccagatgtccggggcccagatcaaaattgccaacccagtggaaggctcctctggtaggcaggttactatcactggctctgctgccagtattagtctggcccagtatctaatcaatgccaggctttcctctgagaagggcatggggtgcagctag

SEQ ID NO: 1084 - DNA, 1200 bp, Homo sapiens
atggcgcacattaccattaaccagtacctgcagcaggtgtacgaagccatcgacagcagagatggagcatcttgtgcagagttggtgtcttttaaacatcctcatgttgcaaacccacgacttcaaatggcctctccagaggagaagtgtcaacaagtcttggaacccccttatgatgaaatgtttgcagctcatttaaggtgcacttatgcagtggggaatcatgacttcatagaggcatacaagtgccagaccgtgatagtccaatcattcttgcgagcattccaggcccacaaagaagaaaactgggctctgcctgtcatgtatgcagtagcgcttgaccttcgagtgtttgccaataatgcagatcaacagttggtaaagaaaggaaaaagcaaagttggggacatgttggaaaaagcagcagagttactgatgagctgtttccgggtctgtgccagcgacacccgtgctggtatagaggactctaagaagtggggcatgctgtttctggtgaaccagctgtttaaaatctacttcaagatcaacaaactccatttatgtaaacccctaattagagcaattgacagctcaaacctgaaagacgattacagcactgcacagagagtaacatacaaatactacgttggacgcaaggctatgtttgacagcgattttaagcaagctgaggagtacctgtcatttgcctttgagcattgtcaccgttctagtcagaagaacaaaaggatgattctgatctatttgcttccagtaaaaatgctattgggtcacatgcccactgtggagctcctgaaaaagtatcacctgatgcagtttgcggaagtaaccagagctgtgagcgagggcaacctgctgctgctgcacgaggcgctggcgaagcacgaggccttcttcattcgctgcggaatcttcctcatcctggagaagctgaagatcatcacctacaggaacctctttaagaaagtgtatttgttactgaaaacacaccagctgtctctggatgcttttctggttgccttgaagttcatgcaggtggaggacgtggacattgacgaagttcagtgtattctggctaacttgatatacatgggacacgtcaaaggctacatatcgcatcagcatcagaagctggtggtcagcaagcagaacccatttcctcccctgtccacggtgtgttga

SEQ ID NO: 1085 - DNA, 858 bp, Homo sapiens
atgccgggagcgcgcagtggcggcagcggcggcgacggcagtaacagcggcagctacagcggggacgcgagcggggcggtgacggtgtgggaggtggtctcactcttgggaaaactgctgggcaccgtcgtcgcgctgaaggtggttctgtacctgctccgagtgtgcttagcgatggcctggaaatccggcggcgccagccactcggagctaatccacaatctccgcaaaaatggaatcatcaagacagataaagtatttgaagtgatgctggctacagaccgctcccactatgcaaaatgtaacccatacatggattctccacaatcaataggtttccaagcaacaatcagtgctccacacatgcatgcatatgcgctagaacttctatttgatcagttgcatgaaggagctaaagctcttgatgtaggatctggaagtggaatccttactgcatgttttgcacgtatggttggatgtactggaaaagtcataggaattgatcacattaaagagctagtagatgactcagtaaataatgtcaggaaggacgatccaacacttctgtcttcagggagagtacagcttgttgtgggggatggaagaatgggatatgctgaagaagccccttatgatgccattcatgtgggagctgcagcccctgttgtaccccaggcgctaatagatcagttaaagcccggaggaagattgatattgcctgttggtcctgcaggcggaaaccaaatgttggagcagtatgacaagctacaagatggcagcatcaaaatgaagcctctgatgggggtgatatacgtgcctttaacagataaagaaaagcagtggtccaggtggaagtga

SEQ ID NO: 1086 - DNA, 1452 bp, Homo sapiens
atggcccaagctgacatcgcgctgatcggattggccgtcatgggccagaacttaattctgaacatgaatgaccacggctttgtggtctgtgcttttaataggactgtctccaaagttgatgatttcttggccaatgaggcaaagggaaccaaagtggtgggtgcccagtccctgaaagagatggtctccaagctgaagaagccccggcggatcatcctcctggtgaaggctgggcaagctgtggatgatttcatcgagaaattggtaccattgttggatactggtgacatcatcattgacggaggaaattctgaatatagggacaccacaagacggtgccgagacctcaaggccaagggaattttatttgtggggagcggagtcagtggtggagaggaaggggcccggtatggcccatcgctcatgccaggagggaacaaagaagcgtggccccacatcaagaccatcttccaaggcattgctgcaaaagtgggaactggagaaccctgctgtgactgggtgggagatgagggagcaggccacttcgtgaagatggtgcacaacgggatagagtatggggacatgcagctgatctgtgaggcataccacctgatgaaagacgtgctgggcatggcgcaggacgagatggcccaggcctttgaggattggaataagacagagctagactcattcctgattgaaatcacagccaatattctcaagttccaagacaccgatggcaaacacctgctgccaaagatcagggacagcgcggggcagaagggcacagggaagtggaccgccatctccgccctggaatacggcgtacccgtcaccctcattggagaagctgtctttgctcggtgcttatcatctctgaaggatgagagaattcaagctagcaaaaagctgaagggtccccagaagttccagtttgatggtgataagaaatcattcctggaggacattcggaaggcactctacgcttccaagatcatctcttacgctcaaggctttatgctgctaaggcaggcagccaccgagtttggctggactctcaattatggtggcatcgccctgatgtggagagggggctgcatcattagaagtgtattcctaggaaagataaaggatgcatttgatcgaaacccggaacttcagaacctcctactggacgacttctttaagtcagctgttgaaaactgccaggactcctggcggcgggcagtcagcactggggtccaggctggcattcccatgccctgttttaccactgccctctccttctatgacgggtacagacatgagatgcttccagccagcctcatccaggctcagcgggattacttcggggctcacacctatgaactcttggccaaaccagggcagtttatccacaccaactggacaggccatggtggcaccgtgtcatcctcgtcatacaatgcctga

SEQ ID NO: 1087 - DNA, 1008 bp, Homo sapiens
atgggtcacccgccgctgctgccgctgctgctgctgctccacacctgcgtcccagcctcttggggcctgcggtgcatgcagtgtaagaccaacggggattgccgtgtggaagagtgcgccctgggacaggacctctgcaggaccacgatcgtgcgcttgtgggaagaaggagaagagctggagctggtggagaaaagctgtacccactcagagaagaccaacaggaccctgagctatcggactggcttgaagatcaccagccttaccgaggttgtgtgtgggttagacttgtgcaaccagggcaactctggccgggctgtcacctattcccgaagccgttacctcgaatgcatttcctgtggctcatcagacatgagctgtgagaggggccggcaccagagcctgcagtgccgcagccctgaagaacagtgcctggatgtggtgacccactggatccaggaaggtgaagaagggcgtccaaaggatgaccgccacctccgtggctgtggctaccttcccggctgcccgggctccaatggtttccacaacaacgacaccttccacttcctgaaatgctgcaacaccaccaaatgcaacgagggcccaatcctggagcttgaaaatctgccgcagaatggccgccagtgttacagctgcaaggggaacagcacccatggatgctcctctgaagagactttcctcattgactgccgaggccccatgaatcaatgtctggtagccaccggcactcacgaaccgaaaaaccaaagctatatggtaagaggctgtgcaaccgcctcaatgtgccaacatgcccacctgggtgacgccttcagcatgaaccacattgatgtctcctgctgtactaaaagtggctgtaaccacccagacctggatgtccagtaccgcagtggggctgctcctcagcctggccctgcccatctcagcctcaccatcaccctgctaatgactgccagactgtggggaggcactctcctctggacctaa

SEQ ID NO: 1088 - DNA, 957 bp, Homo sapiens
atggacaaacaaaactcacagatgaatgcttctcacccggaaacaaacttgccagttgggtatcctcctcagtatccaccgacagcattccaaggacctccaggatatagtggctaccctgggccccaggtcagctacccacccccaccagccggccattcaggtcctggcccagctggctttcctgtcccaaatcagccagtgtataatcagccagtatataatcagccagttggagctgcaggggtaccatggatgccagcgccacagcctccattaaactgtccacctggattagaatatttaagtcagatagatcagatactgattcatcagcaaattgaacttctggaagttttaacaggttttgaaactaataacaaatatgaaattaagaacagctttggacagagggtttactttgcagcggaagatactgattgctgtacccgaaattgctgtgggccatctagaccttttaccttgaggattattgataatatgggtcaagaagtcataactctggagagaccactaagatgtagcagctgttgttgtccctgctgccttcaggagatagaaatccaagctcctcctggtgtaccaataggttatgttattcagacttggcacccatgtctaccaaagtttacaattcaaaatgagaaaagagaggatgtactaaaaataagtggtccatgtgttgtgtgcagctgttgtggagatgttgattttgagattaaatctcttgatgaacagtgtgtggttggcaaaatttccaagcactggactggaattttgagagaggcatttacagacgctgataactttggaatccagttccctttagaccttgatgttaaaatgaaagctgtaatgattggtgcctgtttcctcattgacttcatgttttttgaaagcactggcagccaggaacaaaaatcaggagtgtggtag

SEQ ID NO: 1089 - DNA, 426 bp, Homo sapiens
atgaatgccagaggacttggatctgagctaaaggacagtattccagttactgaactttcagcaagtggaccttttgaaagtcatgatcttcttcggaaaggtttttcttgtgtgaaaaatgaacttttgcctagtcatccccttgaattatcagaaaaaaatttccagctcaaccaagataaaatgaatttttccacactgagaaacattcagggtctatttgctccgctaaaattacagatggaattcaaggcagtgcagcaggttcagcgtcttccatttctttcaagctcaaatctttcactggatgttttgaggggtaatgatgagactattggatttgaggatattcttaatgatccatcacaaagcgaagtcatgggagagccacacttgatggtggaatataaacttggtttactgtaa

SEQ ID NO: 1090 - DNA, 2184 bp, Homo sapiens
atgcagcagaagaccaaattatttctccaagctttgaagtatagtattcctcaccttggaaaatgcatgcagaaacagcatttgaatcactataacttcgctgatcattgttacaatagaataaaattgaaaaaatatcacctaaccaagtgtcttcagaataaacccaagatatcagagttagcaagaaacatcccaagtcggagcttctcatgtaaggatcttcagcctgttaaacaagaaaacgaaaaaccccttccagaaaacatggatgcatttgaaaaagtgagaacaaaattagaaacacagccacaagaagaatatgaaatcatcaatgtggaagttaaacatggtggttttgtttattaccaagaaggttgttgcttggttcgttccaaagatgaagaagcagacaatgataattatgaagttttattcaatttggaggaacttaagttagaccagcccttcattgattgtatcagagttgctccagatgaaaaatatgtggctgccaagataagaactgaagattctgaagcatctacctgtgtaattataaagctcagcgatcagcccgtaatggaagcttctttcccgaatgtgtccagttttgaatgggtaaaggacgaggaagatgaagatgttttattctacaccttccagaggaaccttcgctgtcatgacgtatatcgagccacttttggtgataacaaacgtaatgaacgcttttacacagaaaaagacccaagctactttgttttcctttatcttacaaaagacagtcgtttcctcaccataaatattatgaacaagactacttctgaagtgtggttgatagatggcctgagcccttgggacccaccagtacttatccagaagcgaatacatggggtcctttactatgttgaacacagagatgatgaattatacattctcactaatgttggagaacctacagaatttaagctaatgagaacagcggctgatacccctgcaattatgaattgggatttattttttacaatgaagagaaatacaaaagtgatagacttggacatgtttaaggatcactgtgttctatttctgaagcacagcaatctcctttatgttaatgtgattggtctggctgatgattcagttcggtctctaaagctccctccttgggcctgtggattcataatggatacaaattctgacccaaagaactgcccctttcaactttgctctccaatacgtcccccaaaatattacacatacaagtttgcagaaggcaaactgtttgaggaaactgggcatgaagacccaatcacaaagactagtcgcgttttacgtctagaagccaaaagcaaggatggaaaattagtgccaatgactgttttccacaaaactgactctgaggacttgcagaagaaacctctcttggtacatgtatatggagcttatggaatggatttgaaaatgaatttcaggcctgagaggcgggtcctggtggatgatggatggatattagcatactgccatgttcgaggtggtggtgagttaggcctccagtggcacgctgatggccgcctaactaaaaaactcaatggccttgctgatttagaggcttgcattaagacgcttcatggccaaggcttttctcagccaagtctaacaaccctgactgctttcagtgctggaggggtgcttgcaggagcattgtgtaattctaatccagagctggtgagagcggtgactttggaggcacctttcttggatgttctcaacaccatgatggacactacacttcctctgacattagaagaattagaagaatgggggaatccttcatctgatgaaaaacacaagaactacataaaacgttactgtccctatcaaaatattaaacctcagcattatccttcaattcacataacggcatatgaaaacgatgaacgggtacctctgaaaggaattgtaagttatactgagaaactcaaggaagccatcgcggagcatgctaaggacacaggtgaaggctatcagacccctaatattattctagatattcagcctggaggcaatcatgtaattgaggattctcacaaaaagattacagcccaaattaaattcctgtacgaggaacttggacttgacagcaccagtgttttcgaggatcttaagaaatacctgaaattctga

SEQ ID NO: 1091 - DNA, 2031 bp, Homo sapiens; identical to SEQ ID NO: 457

SEQ ID NO: 1092 - DNA, 666 bp, Homo sapiens
atgtctgatggagattatgattacctcatcaagtttttagctttgggagactctggtgtagggaagaccagtgtactttaccaatatacagatggtaaatttaactccaaatttatcacaacagtgggcattgatttcagggaaaaaagagtggtgtacagagccagtgggccggatggagccactggcagaggccagagaatccacctgcagttatgggacacagcagggcaggagaggtttcgtagcttaacgacagcgttcttcagagatgctatgggttttcttctactttttgatctgacaaatgagcaaagtttcctcaatgtcagaaactggataagccagctacagatgcatgcatattgtgaaaacccagatatagtgctgtgtggaaacaagagtgatctggaggaccagagagtagtgaaagaggaggaagccatagcactcgcagagaaatatggaatcccctactttgaaactagtgctgccaatgggacaaacataagccaagcaattgagatgcttctggacctgataatgaagcgaatggaacggtgtgtggacaagtcctggattcctgaaggagtggtgcgatcaaatggtcatgcctctacggatcagttaagtgaagaaaaggagaaaggggcatgtggctgttga

SEQ ID NO: 1093 - DNA, 624 bp, Homo sapiens; identical to SEQ ID NO: 474

SEQ ID NO: 1094 - DNA, 621 bp, Homo sapiens; identical to SEQ ID NO: 476

SEQ ID NO: 1095 - DNA, 1221 bp, Homo sapiens; identical to SEQ ID NO: 480

SEQ ID NO: 1096 - DNA, 660 bp, Homo sapiens
atggattctggaactcgcccagttggtagctgctgtagcagccccgctgggctctcacgggagtacaaactagtgatgctgggtgctggtggtgtagggaagagtgccatgaccatgcagttcatcagccaccgattcccagaagatcatgatcccaccattgaagatgcttataagatcaggatccgtattgatgatgagcctgccaatctggacattttggatacagctggacaggcagagtttacagccatgcgggaccagtatatgagggcaggagaagggtttatcatctgttactctatcacggatcgtcgaagtttccatgaagttcgtgagtttaaacagcttatttatcgagtccgacgtactgacgatacacctgtggttcttgtgggaaacaagtcagacctcaaacagctaagacaggtcaccaaggaagaaggattggccttggcccgagaattcagctgtcccttttttgagacatctgctgcataccgctactatattgatgatgttttccatgcccttgtacgggagatacgtaggaaagaaaaggaggcagtactggccatggagaaaaaatctaagcccaaaaacagtgtatggaagaggctaaaatcaccattccggaagaagaaagattcagtaacttga

SEQ ID NO: 1097 - DNA, 615 bp, Homo sapiens
atgggtgcatacaagtacatccaggagctatggagaaagaagcagtctgatgtcatgcgctttcttctgagggtccgctgctggcagtaccgccagctctctgctctccacagggctccccgccccacccggcctgataaagcgcgccgactgggctacaaggccaagcaaggttacgttatatataggattcgtgttcgccgtggtggccgaaaacgcccagttcctaagggtgcaacttacggcaagcctgtccatcatggtgttaaccagctaaagtttgctcgaagccttcagtccgttgcagaggagcgagctggacgccactgtggggctctgagagtcctgaattcttactgggttggtgaagattccacatacaaattttttgaggttatcctcattgatccattccataaagctatcagaagaaatcctgacacccagtggatcaccaaaccagtccacaagcacagggagatgcgtgggctgacatctgcaggccgaaagagccgtggccttggaaagggccacaagttccaccacactattggtggctctcgccgggcagcttggagaaggcgcaatactctccagctccaccgttaccgctaa

SEQ ID NO: 1098 - DNA, 387 bp, Homo sapiens; identical to SEQ ID NO: 493

SEQ ID NO: 1099 - DNA, 579 bp, Homo sapiens
atgaagactattctcagcaatcagactgtcgacattccagaaaatgtcgacattactctgaagggacgcacagttatcgtgaagggccccagaggaaccctgcggagggacttcaatcacatcaatgtagaactcagccttcttggaaagaaaaaaaagaggctccgggttgacaaatggtggggtaacagaaaggaactggctaccgttcggactatttgtagtcatgtacagaacatgatcaagggtgttacactgggcttccgttacaagatgaggtctgtgtatgctcacttccccatcaacgttgttatccaggagaatgggtctcttgttgaaatccgaaatttcttgggtgaaaaatatatccgcagggttcggatgagaccaggtgttgcttgttcagtatctcaagcccagaaagatgaattaatccttgaaggaaatgacattgagcttgtttcaaattcagcggctttgattcagcaagccacaacagttaaaaacaaggatatcaggaaatttttggatggtatctatgtctctgaaaaaggaactgttcagcaggctgatgaataa

SEQ ID NO: 1100 - DNA, 456 bp, Homo sapiens
atggcacctcgaaaggggaaggaaaagaaggaagaacaggtcatcagcctcggacctcaggtggctgaaggagagaatgtatttggtgtctgccatatctttgcatccttcaatgacacttttgtccatgtcactgatctttctggcaaggaaaccatctgccgtgtgactggtgggatgaaggtaaaggcagaccgagatgaatcctcaccatatgctgctatgttggctgcccaggatgtggcccagaggtgcaaggagctgggtatcaccgccctacacatcaaactccgggccacaggaggaaataggaccaagacccctggacctggggcccagtcggccctcagagcccttgcccgctcgggtatgaagatcgggcggattgaggatgtcacccccatcccctctgacagcactcgcaggaaggggggtcgccgtggtcgccgtctgtga

SEQ ID NO: 1101 - DNA, 792 bp, Homo sapiens
atggctcgtggtcccaagaagcatctgaagcgggtggcagctccaaagcattggatgctggataaattgaccggtgtgtttgctcctcgtccatccaccggtccccacaagttgagagagtgtctccccctcatcattttcctgaggaacagacttaagtatgccctgacaggagatgaagtaaagaagatttgcatgcagcggttcattaaaatcgatggcaaggtccgaactgatataacctaccctgctggattcatggatgtcatcagcattgacaagacgggagagaatttccgtctgatctatgacaccaagggtcgctttgctgtacatcgtattacacctgaggaggccaagtacaagttgtgcaaagtgagaaagatctttgtgggcacaaaaggaatccctcatctggtgactcatgatgcccgcaccatccgctaccccgatcccctcatcaaggtgaatgataccattcagattgatttggagactggcaagattactgatttcatcaagttcgacactggtaacctgtgtatggtgactggaggtgctaacctaggaagaattggtgtgatcaccaacagagagaggcaccctggatcttttgacgtggttcacgtgaaagatgccaatggcaacagctttgccactcgactttccaacatttttgttattggcaagggcaacaaaccatggatttctcttccccgaggaaagggtatccgcctcaccattgctgaagagagagacaaaagactggcggccaaacagagcagtgggtga

SEQ ID NO: 1102 - DNA, 600 bp, Homo sapiens
atggacggtcagaagaaaaattggaaggacaaggttgttgacctcctgtactggagagacattaagaagactggagtggtgtttggtgccagcctattcctgctgctttcattgacagtattcagcattgtgagcgtaacagcctacattgccttggccctgctctctgtgaccatcagctttaggatatacaagggtgtgatccaagctatccagaaatcagatgaaggccacccattcagggcatatctggaatctgaagttgctatatctgaggagttggttcagaagtacagtaattctgctcttggtcatgtgaactgcacgataaaggaactcaggcgcctcttcttagttgatgatttagttgattctctgaagtttgcagtgttgatgtgggtatttacctatgttggtgccttgtttaatggtctgacactactgattttggctctcatttcactcttcagtgttcctgttatttatgaacggcatcaggcacagatagatcattatctaggacttgcaaataagaatgttaaagatgctatggctaaaatccaagcaaaaatccctggattgaagcgcaaagctgaatga

SEQ ID NO: 1103 - DNA, 1083 bp, Homo sapiens
atgtttgtggctcgcagcatcgcggcggaccacaaggatctcatccacgatgtctctttcgacttccacgggcggcggatggcaacctgctccagcgatcagagcgttaaggtctgggataaaagtgaaagtggtgattggcattgtactgctagctggaagacacatagtggatctgtatggcgtgtgacatgggcccatcctgaatttgggcaggttttggcttcctgttcttttgaccgaacagctgctgtatgggaagaaatagtaggagaatcaaatgataaactgcgaggacagagccactgggttaaaaggacaactctggtggatagcagaacatctgttactgatgtgaagtttgctcccaagcacatgggtcttatgttagcaacctgttccgcagatggtatagtaagaatctatgaggcaccagatgttatgaatctcagccagtggtctttgcagcatgagatctcatgtaagctaagctgtagttgtatttcttggaacccttcaagctctcgtgctcattcccccatgatcgccgtaggaagtgatgacagtagccccaacgcaatggccaaggttcagatttttgaatataatgaaaacaccaggaaatatgcaaaagctgaaactcttatgacagtcactgatcctgttcatgatattgcattcgctccaaatttgggaagatctttccatattctagcaatagcgaccaaagatgtgagaatttttacattaaagcctgtgaggaaagaactgacttcctctggtgggccaacaaagtttgaaatccatatagtggctcagttcgataatcataattctcaggtctggcgagtgagttggaatataacaggaacggtgctagcatcttcaggagatgatgggtgtgtaagattgtggaaagctaattatatggacaattggaagtgtactggtattttgaaaggtaatgggagcccagtcaatgggagttctcagcagggaacctcaaatccttccctaggttcaactattccaagtcttcagaattcattaaatggatcttctgctggcagaaagcacagctga

SEQ ID NO: 1104 - DNA, 1164 bp, Homo sapiens
atgcctgggcacttacaggaaggcttcggctgcgtggtcaccaaccgattcgaccagttatttgacgacgaatcggaccccttcgaggtgctgaaggcagcagagaacaagaaaaaagaagccggcgggggcggcgttgggggccctggggccaagagcgcagctcaggccgcggcccagaccaactccaacgcggcaggcaaacagctgcgcaaggagtcccagaaagaccgcaagaacccgctgccccccagcgttggcgtggttgacaagaaagaggagacgcagccgcccgtggcgcttaagaaagaaggaataagacgagttggaagaagacctgatcaacaacttcagggtgaagggaaaataattgatagaagaccagaaaggcgaccacctcgtgaacgaagattcgaaaagccacttgaagaaaagggtgaaggaggcgaattttcagttgatagaccgattattgaccgacctattcgaggtcgtggtggtcttggaagaggtcgagggggccgtggacgtggaatgggccgaggagatggatttgattctcgtggcaaacgtgaatttgataggcatagtggaagtgatagatctggcctgaagcacgaggacaaacgtggaggtagcggatctcacaactggggaactgtcaaagacgaattaactgacttggatcaatcaaatgtgactgaggaaacacctgaaggtgaagaacatcatccagtggcagacactgaaaataaggagaatgaagttgaagaggtaaaagaggagggtccaaaagagatgactttggatgagtggaaggctattcaaaataaggaccgggcaaaagtagaatttaatatccgaaaaccaaatgaaggtgctgatgggcagtggaagaagggatttgttcttcataaatcaaagagtgaagaggctcatgctgaagattcggttatggaccatcatttccggaagccagcaaatgatataacgtctcagctggagatcaattttggagaccttggccgcccaggacgtggcggcaggggaggacgaggtggacgtgggcgtggtgggcgcccaaaccgtggcagcaggaccgacaagtcaagtgcttctgctcctgatgtggatgacccagaggcattcccagctctggcttaa

SEQ ID NO: 1105 - DNA, 1140 bp, Homo sapiens
atggagcagctgagctcagcaaacacccgcttcgccttggacctgttcctggcgttgagtgagaacaatccggctggaaacatcttcatctctcccttcagcatttcatctgctatggccatggtttttctggggaccagaggtaacacggcagcacagctgtccaagactttccatttcaacacggttgaagaggttcattcaagattccagagtctgaatgctgatatcaacaaacgtggagcgtcttatattctgaaacttgctaatagattatatggagagaaaacttacaatttccttcctgagttcttggtttcgactcagaaaacatatggtgctgacctggccagtgtggattttcagcatgcctctgaagatgcaaggaagaccataaaccagtgggtcaaaggacagacagaaggaaaaattccggaactgttggcttcgggcatggttgataacatgaccaaacttgtgctagtaaatgccatctatttcaagggaaactggaaggataaattcatgaaagaagccacgacgaatgcaccattcagattgaataagaaagacagaaaaactgtgaaaatgatgtatcagaagaaaaaatttgcatatggctacatcgaggaccttaagtgccgtgtgctggaactgccttaccaaggcgaggagctcagcatggtcatcctgctgccggatgacattgaggacgagtccacgggcctgaagaagattgaggaacagttgactttggaaaagttgcatgagtggactaaacctgagaatctcgatttcattgaagttaatgtcagcttgcccaggttcaaactggaagagagttacactctcaactccgacctcgcccgcctaggtgtgcaggatctctttaacagtagcaaggctgatctgtctggcatgtcaggagccagagatatttttatatcaaaaattgtccacaagtcatttgtggaagtgaatgaagagggaacagaggcggcagctgccacagcaggcatcgcaactttctgcatgttgatgcccgaagaaaatttcactgccgaccatccattccttttctttattcggcataattcctcaggtagcatcctattcttggggagattttcttccccttag

SEQ ID NO: 1106 - DNA, 945 bp, Homo sapiens; identical to SEQ ID NO: 507

SEQ ID NO: 1107 - DNA, 8034 bp, Homo sapiens
atgagcacatgttgttggtgtacgccaggtggtgcttccaccattgacttcctaaagcgctatgcttccaacactccgtccggtgaatttcaaacagccgacgaagacctctgctactgcttggagtgtgtggctgagtaccacaaagcaagagatgaattgccattcttgcatgaggttttatgggaattagaaaccttacgtctcataaatcactttgaaaaatccatgaaggcagaaattggagatgatgatgagttatatatagtagacaataatggagagatgccactgtttgacatcactgggcaagactttgaaaataagcttcgagttcctcttcttgaaatactgaaatatccttacttgcttctacatgaacgtgttaacgagttatgtgttgaagcactttgtcggatggaacaagccaattgctcctttcaggtgtttgataaacatccagggatctatttgtttttagtccatcccaatgaaatggttcggcgttgggctatcttgactgcaagaaacttggggaaagtggacagagatgattattatgacttacaagaagttttactttgcctttttaaagtcattgagttggggcttttagagagtccagacatttatacttcttctgtcctagagaagggtaaactgattcttctgccctcacacatgtatgatactaccaactacaaaagctattggttaggtatttgcatgttgctgaccattcttgaggaacaagccatggattccctgttgttgggctcagacaaacaaaatgattttatgcaatcgatacttcacactatggagagggaagcagatgatgatagtgtggatcctttctggccagcgttacactgttttatggtgattctggatcgccttggatctaaggtctggggtcaacttatggatcctattgtggcatttcaaaccattatcaacaacgcaagctacaatagagagatccgacatatacggaacagctctgtaaggaccaagttagaaccggagtcctatttggatgatatggtgacttgcagccagatcgtatacaattataatcctgaaaagaccaaaaaggattctggatggagaacagccatttgcccagattattgtcctaacatgtatgaagaaatggaaacattagccagtgtacttcagtcagatattggtcaagacatgcgtgttcataacagcacatttctatggttcatcccttttgtccagtccctcatggatcttaaggatttgggtgtggcttacatagcacaggttgttaatcatctgtactctgaagtcaaagaagtcctcaaccaaacagatgctgtgtgtgacaaagtcactgaattttttcttctaattttggtatcagtgattgaactgcatagaaataaaaaatgtttgcatttgctgtgggtaagttcccagcaatgggtggaagccgtcgtcaaatgtgccaagcttcctaccactgcgtttacacggagttctgagaaatcatctggaaattgctccaaaggaacagcaatgatatcttcactgtcattgcattccatgccatctaactctgtacaacttgcttatgtgcagctgattagaagtctccttaaagaaggttatcagcttgggcagcagtctctttgcaagcgattctgggataagctcaacttattccttagaggaaatttatctctaggttggcagttgactagtcaggaaacccatgagctacaaagttgcttaaagcaaattattagaaacataaaattcaaagcacctccatgtaacacttttgtggatctgacttctgcatgtaaaatctctcctgcatcttataataaagaagaaagtgaacaaatggggaagacgtctagaaaagatatgcattgtttggaagcttccagcccaacattttctaaagaaccaatgaaagtgcaagacagtgtattgatcaaagcagataacactatagaaggtgacaataatgagcaaaattatataaaggatgtgaaactagaggaccatctcttagctgggtcatgcttaaagcagagtagtaaaaacatttttactgaaagagctgaagatcaaattaaaataagtacaaggaagcagaagtctgtaaaagagatctcttcatatacaccaaaggactgtacttcaagaaatggtccagaaaggggatgtgacagaggaataatagtatcaacacgtttgttgactgattctagcactgatgctttggaaaaagtgtccacatcgaatgaagatttctctttaaaggatgatgctcttgctaaaacctcaaaacgaaaaactaaggtacagaaagatgaaatctgtgcaaagttatcacatgtaataaagaagcaacacaggaagagtactttggtcgataatactatcaatttagatgaaaatttgactgtatctaacattgagagtttctattcaaggaaagatacaggagttcagaaaggagatggtttcatacacaatctttctttagaccctagtggtgttctggatgataagaatggagaacaaaaatctcaaaacaatgtattgccaaaagagaaacaattaaagaatgaagaattagttattttctctttccatgaaaacaattgtaaaatacaggaatttcatgttgatggtaaagaattgatcccttttacagaaatgaccaatgcttcagagaagaaatcatctccctttaaagatcttatgactgtacctgaatcaagagatgaggagatgagtaatagtaccagtgtgatttattctaacttgacaagagaacaggcccctgacatcagtcctaaatctgacaccttaacggattctcagatagacagagaccttcacaaattatctttactagctcaagccagtgttattacgttcccatccgattcacctcagaactcatcgcagctgcaaaggaaagtaaaagaagataaaagatgtttcacagctaaccaaaataatgttggagatacctcccgtggacaggttattattatttcagattctgatgatgatgatgatgaaagaatcctgagtcttgagaaactcactaaacaggacaaaatatgccttgagagggaacatccagagcagcacgtttcaacagttaatagtaaggaggaaaagaatccagtaaaggaagaaaagacagagactctttttcagtttgaggaatctgattctcagtgttttgagtttgaaagttcatctgaagtgttttcagtttggcaagatcatccagacgataataattcagttcaagatggtgagaaaaaatgtttggctcctatagccaatactacaaatggtcagggttgtacagattatgtatctgaagttgttaaaaaaggagcagagggcattgaagaacacacaagaccacggagtatttctgttgaagaattttgtgaaattgaagtaaaaaagcctaagagaaaacgatctgaaaaaccaatggctgaagatcctgtgaggccttcatcttctgtcagaaatgagggccagtctgatactaataagagagatcttgtgggaaatgattttaaaagtattgatagaaggacttcaactcccaattcacgtattcagagagccactacggtttcacaaaagaagtcttcaaagctttgtacttgtacagaacccatcaggaaagttccagtttctaagacccctaagaaaactcattcagatgccaaaaaaggacagaatagaagttcaaattacctaagttgtagaacaactcctgctatagtgccgccaaagaaatttcgtcagtgtcctgagccaacttcaacagctgagaaacttggcctgaaaaagggtcctcgtaaggcatatgagttgtcccagcggtctttggattatgtagctcaattacgtgatcatggcaaaactgttggagtagttgatacccgaaaaaagactaaattaatttctcctcagaacctgtctgtcagaaataataagaaacttctgactagtcaagaacttcagatgcaaaggcagatcagacccaaatcacaaaaaaatagacgaagactttctgattgtgaaagtacagatgttaaaagagcagggtcacatacagcacagaattctgacatatttgtaccagaatctgataggtcagattataattgtacaggaggaactgaggtacttgccaacagtaacagaaaacagttaataaaatgcatgccttctgaaccagaaaccataaaagcaaaacatgggtctccagcaactgatgatgcttgccctttgaaccagtgtgattctgtagtgttaaatggaacagtaccaacaaatgaagtaattgtctccacttcagaagaccctctgggtggaggtgatccaacagcacgtcatatagagatggcagctttgaaagaaggagagcctgactccagcagtgatgcagaggaagataacttatttttaacccaaaatgatcctgaagatatggatttatgttcacaaatggagaatgacaattataaactcattgaactaattcatggaaaagatacagttgaggttgaagaagattctgtaagtcggcctcagttggaatctttgagtggcacaaagtgtaagtacaaagattgtcttgaaaccacaaaaaaccagggtgaatactgcccaaaacactctgaagtgaaagcagcagatgaagatgtatttcgtaaacctggcttgcctcctcctgcatctaaacctttgagacctaccactaagatttttagctcaaagagtacttcacgaattgctggtctttctaaatctttggaaacttcttcagcactttcaccgtctctaaaaaataagtcaaaggggatacagtcgattttgaaagtaccacagccagttcccctcatagctcagaagccagttggtgaaatgaagaattcgtgcaatgttcttcatcctcagtctccgaataattccaacaggcaaggttgcaaagttccatttggtgaaagcaaatattttccatcttcctctccagtaaacattcttttgtcatcacagtctgtctctgacaccttcgttaaagaggtcttaaaatggaaatatgaaatgtttttgaactttggtcagtgtgggccccctgcaagtctttgtcagtccatctcaagacctgtgcctgtcagatttcacaattatggagattattttaatgtttttttccctttgatggtattgaatacttttgaaacagtggcacaagaatggctcaactctccaaatagagagaatttctatcagttgcaagtacgaaaatttcctgccgattatataaaatactgggagtttgcagtttatctggaagaatgtgaactggctaaacagctttatccaaaggaaaacgatttggtgtttttagctcctgagagaataaatgaagagaagaaagatacagagagaaatgacatacaagatctccacgaatatcattctggttatgttcataaatttcgccgcacgtcagtcatgcgtaatgggaaaactgagtgttacctttccatccagactcaagagaactttccggccaatttaaacgaacttgtgaattgtattgtaatcagttctctggtaactacacaaaggaagttgaaagccatgtctctgttgggtagtcggaaccaactggctagagctgttctgaatccaaaccctatggacttctgtacaaaagatttactgactacaacatctgagagaattattgcgtacttaagagatttcaatgaagatcaaaagaaagcaatagaaactgcatatgctatggtgaaacactcaccatcagttgccaaaatctgcttgattcatggaccacctggaacaggaaaatcaaaaactattgttggcctcctctatcgtctactgacagagaaccagaggaaggggcattcagacgaaaactccaatgccaaaatcaaacaaaaccgtgtcctcgtgtgtgcaccttccaatgcagctgttgatgaactcatgaaaaaaattatccttgaattcaaagaaaaatgtaaagacaagaagaatcctttaggaaactgtggagatataaatttagtacgactgggtccagaaaagtctattaatagtgaggttctaaagttcagtttggacagccaagtaaaccacagaatgaaaaaagagttaccttctcatgttcaggcgatgcataaaagaaaggaatttctagattatcagctggatgagctttcccggcagcgagctctatgccgaggtggacgggaaatacagaggcaagaattagatgaaaacatttccaaagtttctaaggaaaggcaggaacttgcttctaaaattaaagaggttcaaggacgcccacagaaaacacagagtatcatcatcttagagtcccatatcatctgctgcacgttgagcacaagtggtggtttactacttgagtctgctttccgtgggcaagggggtgtccccttcagctgtgtcattgttgatgaggctggacagtcttgtgaaattgagactcttactccactcatccatcgctgcaataagctcatcctagtaggagatcctaagcagctccctccgacagtcatctctatgaaagcacaggagtatggctacgaccagtcaatgatggctcgcttctgcagactgctggaagagaatgtagaacacaacatgatcagcaggctgcccattctacagctcactgttcagtacaggatgcatccagacatatgcctcttcccttctaattatgtttataacagaaacttaaaaacaaatagacagacagaagccattcgatgttcatcagattggccatttcagccataccttgtgtttgatgttggagatggttcagaaagacgggataatgactcatatataaatgttcaagaaataaaactggtgatggaaataattaagcttattaaagacaaaagaaaggatgttagttttcgaaacattggcataataactcattacaaggcccagaagacgatgattcagaaggatttggacaaagagttcgatagaaaaggaccagcagaagtagacactgtggatgcattccagggtcggcagaaggattgtgttattgttacgtgtgtcagagcaaatagcatccaaggttcaattggattcctggcaagtttgcagagattgaatgtcaccatcacacgagccaagtacagcctcttcatcctcggacatttgaggaccctgatggaaaaccagcattggaatcagctgattcaggatgctcagaagcgtggtgccattattaagacctgtgacaaaaactatagacatgatgcagtgaagattctgaaactcaagcctgtgctgcagagaagtctcactcaccctcctaccatagccccagaggggtccagaccccagggtggtttgcccagcagcaagctagacagtggatttgccaagacatctgttgctgcttctctataccacacaccctctgactccaaggaaattactcttactgttacttcaaaggaccctgaaagacctcctgttcatgaccaacttcaggacccacgactgctgaagaggatgggcattgaggtcaaaggaggaatattcctttgggatccacaaccctcgagcccccagcatcctggagcaacacctcctacgggcgagccgggcttccctgtcgttcaccaggacctgagccatatacagcagcccgctgctgtagtggctgctctgagcagccacaaacctcccgtgcggggcgaacctccagctgccagtcccgaggcttccacgtgtcagagcaaatgtgatgacccggaagaggagctctgtcacaggagagaggccagggctttcagtgaaggggagcaggagaagtgtggttccgagacccatcacaccaggaggaactctaggtgggacaagaggacactggagcaggaggacagcagttccaagaaaagaaagcttttatag

SEQ ID NO: 1108 - DNA, 1098 bp, Homo sapiens
atgaatatcatggacttcaacgtgaagaagctggcggccgacgcaggcaccttcctcagtcgcgccgtgcagttcacagaagaaaagcttggccaggctgagaagacagaattggatgctcacttagagaacctccttagcaaagctgaatgtaccaaaatatggacagaaaaaataatgaaacaaactgaagtgttattgcagccaaatccaaatgccaggatagaagaatttgtttatgagaaactggatagaaaagctccaagtcgtataaacaacccagaacttttgggacaatatatgattgatgcagggactgagtttggcccaggaacagcttatggtaatgcccttattaaatgtggagaaacccaaaaaagaattggaacagcagacagagaactgattcaaacgtcagccttaaattttcttactcctttaagaaactttatagaaggagattacaaaacaattgctaaagaaaggaaactattgcaaaataagagactggatttggatgctgcaaaaacgagactaaaaaaggcaaaagctgcagaaactagaaattcatctgaacaggaattaagaataactcaaagtgaatttgatcgtcaagcagagattaccagacttctgctagagggaatcagcagtacacatgcccatcaccttcgctgtctgaatgactttgtagaagcccagatgacttactatgcacagtgttaccagtatatgttggacctccagaaacaactgggaagttttccatccaattatcttagtaacaacaatcagacttctgtgacacctgtaccatcagttttaccaaatgcgattggttcttctgccatggcttcaacaagtggcctagtaatcacctctccttccaacctcagtgaccttaaggagtgtagtggcagcagaaaggccagggttctctatgattatgatgcagcaaacagtactgaattatcacttctggcagatgaggtgatcactgtgttcagtgttgttggaatggattcagactggctaatgggggaaaggggaaaccagaagggcaaggtgccaattacctacttagaactgctcaattaa

SEQ ID NO: 1109 - DNA, 1008 bp, Homo sapiens
atggctggttccccaacatgcctcaccctcatctatatcctttggcagctcacagggtcagcagcctctggacccgtgaaagagctggtcggttccgttggtggggccgtgactttccccctgaagtccaaagtaaagcaagttgactctattgtctggaccttcaacacaacccctcttgtcaccatacagccagaagggggcactatcatagtgacccaaaatcgtaatagggagagagtagacttcccagatggaggctactccctgaagctcagcaaactgaagaagaatgactcagggatctactatgtggggatatacagctcatcactccagcagccctccacccaggagtacgtgctgcatgtctacgagcacctgtcaaagcctaaagtcaccatgggtctgcagagcaataagaatggcacctgtgtgaccaatctgacatgctgcatggaacatggggaagaggatgtgatttatacctggaaggccctggggcaagcagccaatgagtcccataatgggtccatcctccccatctcctggagatggggagaaagtgatatgaccttcatctgcgttgccaggaaccctgtcagcagaaacttctcaagccccatccttgccaggaagctctgtgaaggtgctgctgatgacccagattcctccatggtcctcctgtgtctcctgttggtgcccctcctgctcagtctctttgtactggggctatttctttggtttctgaagagagagagacaagaagagtacattgaagagaagaagagagtggacatttgtcgggaaactcctaacatatgcccccattctggagagaacacagagtacgacacaatccctcacactaatagaacaatcctaaaggaagatccagcaaatacggtttactccactgtggaaataccgaaaaagatggaaaatccccactcactgctcacgatgccagacacaccaaggctatttgcctatgagaatgttatctag

SEQ ID NO: 1110 - DNA, 678 bp, Homo sapiens
atggtcacccacagcaagtttcccgccgccgggatgagccgccccctggacaccagcctgcgcctcaagaccttcagctccaagagcgagtaccagctggtggtgaacgcagtgcgcaagctgcaggagagcggcttctactggagcgcagtgaccggcggcgaggcgaacctgctgctcagtgccgagcccgccggcacctttctgatccgcgacagctcggaccagcgccacttcttcacgctcagcgtcaagacccagtctgggaccaagaacctgcgcatccagtgtgaggggggcagcttctctctgcagagcgatccccggagcacgcagcccgtgccccgcttcgactgcgtgctcaagctggtgcaccactacatgccgccccctggagccccctccttcccctcgccacctactgaaccctcctccgaggtgcccgagcagccgtctgcccagccactccctgggagtccccccagaagagcctattacatctactccgggggcgagaagatccccctggtgttgagccggcccctctcctccaacgtggccactcttcagcatctctgtcggaagaccgtcaacggccacctggactcctatgagaaagtcacccagctgccggggcccattcgggagttcctggaccagtacgatgccccgctttaa

SEQ ID NO: 1111 - DNA, 2496 bp, Homo sapiens
atggagcggccctggggagctgcggacggcctctcgcgctggccccatggcctcggcctcctcctcctcctgcagctgctgccgccgtcgaccctcagccaggaccggctggacgcgccgccgccgcccgctgcgccgctgccgcgctggtctggccccatcggggtgagctgggggctgcgggcggccgcagccgggggcgcgtttccccgcggcggccgttggcgtcgcagcgcgccgggcgaggacgaggagtgcggccgggtccgggacttcgtcgccaagctggccaacaacacgcaccagcatgtgtttgatgatctcagaggctcagtatccttgtcctgggttggagatagcactggggtcattctagtcttgactaccttccatgtaccactggtaattatgacttttggacagtccaagctatatcgaagtgaggattatgggaagaactttaaggatattacagatctcatcaataacacctttattcggactgaatttggcatggctattggtcctgagaactctggaaaggtggtgttaacagcagaggtgtctggaggaagtcgtggaggaagaatctttagatcatcagattttgcgaagaattttgtgcaaacagatctcccttttcatcctctcactcagatgatgtatagccctcagaattctgattatcttttagctctcagcactgaaaatggcctgtgggtgtccaagaattttgggggaaaatgggaagaaatccacaaagcagtatgtttggccaaatggggatcagacaacaccatcttctttacaacctatgcaaatggctcctgcaaagctgaccttggggctctggaattatggagaacttcagacttgggaaaaagcttcaaaactattggtgtgaaaatctactcatttggtcttgggggacgtttcctttttgcctctgtgatggctgataaggatacaacaagaaggatccacgtttcaacagatcaaggggacacatggagcatggcccagctcccctccgtgggacaggaacagttctattctattctggcagcaaatgatgacatggtattcatgcatgtagatgaacctggagacactgggtttggcacaatctttacctcagatgatcgaggcattgtctattccaagtctttggaccgacatctctacactaccacaggcggagagacggactttaccaacgtgacctccctccgcggcgtctacataacaagcgtgctctccgaagataattctatccagaccatgatcacttttgaccaaggaggaaggtggacgcacctgaggaagcctgaaaacagtgaatgtgatgctacagcaaaaaacaagaatgagtgcagccttcatattcatgcttcctacagcatctcccagaaactgaatgttccaatggccccactctcagagccgaatgccgtaggcattgtcattgctcatggtagcgtgggggatgccatctcagtgatggttccagatgtgtacatctcagatgatgggggttactcctggacaaagatgctggaaggaccccactattacaccatcctggattctggaggcatcattgtggccattgagcacagcagccgtcctatcaatgtgattaagttctccacagacgaaggtcaatgctggcaaacctacacgttcaccagggaccccatctatttcactggcctagcttcagaacctggagctaggtccatgaatatcagcatttggggcttcacagaatctttcctgaccagccagtgggtctcctacaccattgattttaaagatatccttgaaaggaactgtgaagagaaggactataccatatggctggcacactccacagaccctgaagattatgaagatggctgcattttgggctacaaagaacagtttctgcggctacgcaagtcatccgtgtgtcagaatggtcgagactatgttgtgaccaagcagccctccatctgcctctgttccctggaggactttctctgtgattttggctactaccgtccagaaaatgactccaagtgtgtggaacagccagaactgaagggccacgacctggagttttgtctgtacggaagagaagaacacctaacaacaaatgggtaccggaaaattccaggggacaaatgccagggtggggtaaatccagttcgagaagtaaaagacttgaaaaagaaatgcacaagcaactttttgagtccggaaaaacagaattccaagtcaaattctgttccaattatcctggccatcgtgggattgatgctggtcacagtcgtagcaggagtgctcattgtgaagaaatatgtctgtgggggaaggttcctggtgcatcgatactctgtgctgcagcagcatgcagaggccaatggtgtggatggtgtggatgctttggacacagcctcccacactaataaaagtggttatcatgatgactcagatgaggacctcttggaatag

SEQ ID NO: 1112 - DNA, 813 bp, Homo sapiens
atgttacaggcgtgcaaaatggaagggtttcccctcgtcccccctccatcagaagacctggtgccctatgacacggatctataccaacgccaaacgcacgagtattacccctatctcagcagtgatggggagagccatagcgaccattactgggacttccacccccaccacgtgcacagcgagttcgagagcttcgccgagaacaacttcacggagctccagagcgtgcagcccccgcagctgcagcagctctaccgccacatggagctggagcagatgcacgtcctcgatacccccatggtgccaccccatcccagtcttggccaccaggtctcctacctgccccggatgtgcctccagtacccatccctgtccccagcccagcccagctcagatgaggaggagggcgagcggcagagccccccactggaggtgtctgacggcgaggcggatggcctggagcccgggcctgggctcctgcctggggagacaggcagcaagaagaagatccgcctgtaccagttcctgttggacctgctccgcagcggcgacatgaaggacagcatctggtgggtggacaaggacaagggcaccttccagttctcgtccaagcacaaggaggcgctggcgcaccgctggggcatccagaagggcaaccgcaagaagatgacctaccagaagatggcgcgcgcgctgcgcaactacggcaagacgggcgaggtcaagaaggtgaagaagaagctcacctaccagttcagcggcgaagtgctgggccgcgggggcctggccgagcggcgccacccgccccactga

SEQ ID NO: 1113 - DNA, 1353 bp, Homo sapiens
atggtgccactggtggctgtggtatcagggccccgtgcccagctctttgcctgcctgctcaggctgggcactcagcaggtcggcccccttcagctgcacaccggggccagccatgcggccaggaaccattatgaggtgctggtgctgggtgggggcagtggcggaatcaccatggctgcccgcatgaagaggaaagtgggtgcagagaatgtggccattgttgagcccagtgagagacatttctaccagccaatctggacactggtgggtgctggtgccaaacaattgtcctcatctggtcgtcccacggcaagtgtgattccatctggtgtagaatggatcaaagctagagtgactgagttgaacccagacaagaactgcattcacacagatgacgacgagaagatctcctaccgatatcttattattgctctcggaatccagctggactatgagaagattaaaggcctacctgaaggtttcgctcatcccaaaatagggtcgaattattcagttaagactgtagagaagacatggaaagctctgcaggacttcaaagagggcaatgccatcttcaccttcccaaatactccagtgaagtgtgctggagcccctcagaagatcatgtacttatcagaagcctacttcaggaagacagggaagcgatccaaggccaatatcattttcaacacttctcttggagccattttcggggttaagaagtatgcagatgccctgcaggagatcatccaggagcggaacctcactgttaactacaagaaaaacctcattgaagtccgagccgataaacaagaggctgtatttgagaacctggacaaaccaggagagacccaagtgatttcatatgaaatgcttcatgtcacacctccaatgagcccaccagatgtcctcaagaccagtcctgtggctgatgctgctggttgggtggatgtggataaagaaactctgcaacacaggaggtacccaaatgtgtttgggattggggactgcaccaaccttcctacgtcaaagaccgctgctgcagtagctgcccagtcaggaatacttgataggacaatttctgtaattatgaagaatcaaacaccaacaaagaagtatgatggctacacatcatgtccactggtgaccggctacaaccgtgtgattcttgctgagtttgactacaaagcagagccgctagaaaccttcccctttgatcaaagcaaagagcgcctttccatgtatctcatgaaagctgacctgatgcctttcctgtattggaatatgatgctaaggggttactggggaggaccagcgtttctgcgcaagttgtttcatctaggtatgagttaa

SEQ ID NO: 1114 - DNA, 2310 bp, Homo sapiens
atggcccaatggaatcagctacagcagcttgacacacggtacctggagcagctccatcagctctacagtgacagcttcccaatggagctgcggcagtttctggccccttggattgagagtcaagattgggcatatgcggccagcaaagaatcacatgccactttggtgtttcataatctcctgggagagattgaccagcagtatagccgcttcctgcaagagtcgaatgttctctatcagcacaatctacgaagaatcaagcagtttcttcagagcaggtatcttgagaagccaatggagattgcccggattgtggcccggtgcctgtgggaagaatcacgccttctacagactgcagccactgcggcccagcaagggggccaggccaaccaccccacagcagccgtggtgacggagaagcagcagatgctggagcagcaccttcaggatgtccggaagagagtgcaggatctagaacagaaaatgaaagtggtagagaatctccaggatgactttgatttcaactataaaaccctcaagagtcaaggagacatgcaagatctgaatggaaacaaccagtcagtgaccaggcagaagatgcagcagctggaacagatgctcactgcgctggaccagatgcggagaagcatcgtgagtgagctggcggggcttttgtcagcgatggagtacgtgcagaaaactctcacggacgaggagctggctgactggaagaggcggcaacagattgcctgcattggaggcccgcccaacatctgcctagatcggctagaaaactggataacgtcattagcagaatctcaacttcagacccgtcaacaaattaagaaactggaggagttgcagcaaaaagtttcctacaaaggggaccccattgtacagcaccggccgatgctggaggagagaatcgtggagctgtttagaaacttaatgaaaagtgcctttgtggtggagcggcagccctgcatgcccatgcatcctgaccggcccctcgtcatcaagaccggcgtccagttcactactaaagtcaggttgctggtcaaattccctgagttgaattatcagcttaaaattaaagtgtgcattgacaaagactctggggacgttgcagctctcagaggatcccggaaatttaacattctgggcacaaacacaaaagtgatgaacatggaagaatccaacaacggcagcctctctgcagaattcaaacacttgaccctgagggagcagagatgtgggaatgggggccgagccaattgtgatgcttccctgattgtgactgaggagctgcacctgatcacctttgagaccgaggtgtatcaccaaggcctcaagattgacctagagacccactccttgccagttgtggtgatctccaacatctgtcagatgccaaatgcctgggcgtccatcctgtggtacaacatgctgaccaacaatcccaagaatgtaaacttttttaccaagcccccaattggaacctgggatcaagtggccgaggtcctgagctggcagttctcctccaccaccaagcgaggactgagcatcgagcagctgactacactggcagagaaactcttgggacctggtgtgaattattcagggtgtcagatcacatgggctaaattttgcaaagaaaacatggctggcaagggcttctccttctgggtctggctggacaatatcattgaccttgtgaaaaagtacatcctggccctttggaacgaagggtacatcatgggctttatcagtaaggagcgggagcgggccatcttgagcactaagcctccaggcaccttcctgctaagattcagtgaaagcagcaaagaaggaggcgtcactttcacttgggtggagaaggacatcagcggtaagacccagatccagtccgtggaaccatacacaaagcagcagctgaacaacatgtcatttgctgaaatcatcatgggctataagatcatggatgctaccaatatcctggtgtctccactggtctatctctatcctgacattcccaaggaggaggcattcggaaagtattgtcggccagagagccaggagcatcctgaagctgacccaggcgctgccccatacctgaagaccaagtttatctgtgtgacaccaacgacctgcagcaataccattgacctgccgatgtccccccgcactttagattcattgatgcagtttggaaataatggtgaaggtgctgaaccctcagcaggagggcagtttgagtccctcacctttgacatggagttgacctcggagtgcgctacctcccccatgtga

SEQ ID NO: 1115 - DNA, 1299 bp, Homo sapiens
atggcgtcccccgtagcagcgcaggccgggaagcttctgcgagccctagcgctgcggccccgcttcctggcggccgggtcccaggcagttcaattaacctccagaagatggctgaacctgcaggaataccagagcaagaaactgatgtctgacaacggagtgagagttcaaagattctttgtagcagacactgcaaatgaagctctcgaggctgctaagagactaaatgcaaaagaaattgttttaaaagcccagatcttagctggaggaagaggaaaaggtgtcttcaatagtggtttgaaaggaggtgttcatttaacaaaagaccctaatgttgtgggacagctggctaaacagatgattgggtacaatctagcgacaaaacaaactccaaaagaaggtgtgaaagttaacaaggtgatggttgctgaagccttggatatttccagagaaacctacctggcaattctgatggaccggtcctgcaatggccccgtgctggtgggcagcccccaggggggcgtcgacattgaagaggtggctgcttcaaacccggagctcatttttaaggagcaaattgacatttttgaaggaataaaggacagccaagctcagcggatggccgaaaatctaggcttcgttgggcctttgaaaagccaggctgcagatcaaattacgaagctgtataatctcttcctgaaaattgatgctactcaggtggaagtgaatccctttggtgaaactccagaaggacaagttgtctgttttgatgccaagataaactttgatgacaacgcagaattccgacaaaaagacatatttgctatggacgacaaatcagagaatgagcccattgaaaatgaagctgccaaatatgatctaaaatacataggactagatgggaacattgcctgctttgtgaatggtgctgggctcgccatggctacttgtgatatcattttccttaatggtgggaagccagccaacttcttggatcttggaggtggtgtaaaggaagctcaagtatatcaagcattcaaattgctcacagctgatcctaaggttgaagccatccttgtcaatatatttggtggtatcgtcaactgtgccatcattgccaatgggatcaccaaagcctgccgggagctagaactcaaggtgcccctggtggtccggcttgaaggaaccaacgtccaagaggcccagaagatactcaacaacagcggactccccattacttcagccattgacctggaggatgcagccaagaaggctgtggccagtgtggccaagaagtga

SEQ ID NO: 1116 - DNA, 1278 bp, Homo sapiens
atggataaaaacattggcgagcaactcaataaagcgtatgaagccttccggcaggcatgcatggatagagattctgcagtaaaagaattacagcaaaagactgagaactatgagcagagaatacgtgaacaacaggaacagctgtcacttcaacagactattattgacaagctaaaatctcagttacttcttgtgaattccactcaagataacaattatggctgtgttcctctgcttgaagacagtgaaacaagaaagaataatttgactcttgatcagccacaagataaagtgatttcaggaatagcaagagaaaaactaccaaaggtaagaagacaagaggtttcttctcctagaaaagaaacttcagcaaggagtcttggcagtcctttgctccatgaaaggggtaatatagagaagactttctgggatctgaaagaagaatttcataaaatatgcatgctagcaaaagcacagaaagaccacttaagcaaacttaatataccagacactgcaactgaaacacagtgctctgtgcctatacagtgtacggataaaacagataaacaagaagcgctgtttaagcctcaggctaaagatgatataaatagaggtgcaccatccatcacatctgtcacaccaagaggactgtgcagagatgaggaagacacctcttttgaatcactttctaaattcaatgtcaagtttccacctatggacaatgactcaactttcttacatagcactccagagagacccggcatccttagtcctgccacgtctgaggcagtgtgccaagagaaatttaatatggagttcagagacaacccagggaactttgttaaaacagaagaaactttatttgaaattcagggaattgaccccatagcttcagctatacaaaaccttaaaacaactgacaaaacaaagccctcaaatctcgtaaacacttgtatcaggacaactctggatagagctgcgtgtttgccacctggagaccataatgcattatatgtaaatagcttcccacttctggacccatctgatgcaccttttccctcactcgattccccgggaaaagcaatccgaggaccacagcagcccatttggaagccctttcctaatcaagacagtgactcggtggtactaagtggcacagactcagaactgcatatacctcgagtatgtgaattctgtcaagcagttttcccaccatccattacatccaggggggatttccttcggcatcttaattcacacttcaatggagagacttaa

SEQ ID NO: 1117 - DNA, 2427 bp, Homo sapiens
atggctgagcttctcgccagcgcaggatcagcctgttcctgggactttccgagagccccgccctcgttccctcccccagccgccagtaggggaggactcggcggtacccggagcttcaggccccaccggggcgcggagagtcccaggcccggccgggaccgggacggcgtccgagtgccaatggctagctctaggtgtcccgctccccgcgggtgccgctgcctccccggagcttctctcgcatggctggggacagtactgctacttctcgccgactgggtgctgctccggaccgcgctgccccgcatattctccctgctggtgcccaccgcgctgccactgctccgggtctgggcggtgggcctgagccgctgggccgtgctctggctgggggcctgcggggtcctcagggcaacggttggctccaagagcgaaaacgcaggtgcccagggctggctggctgctttgaagccattagctgcggcactgggcttggccctgccgggacttgccttgttccgagagctgatctcatggggagcccccgggtccgcggatagcaccaggctactgcactggggaagtcaccctaccgccttcgttgtcagttatgcagcggcactgcccgcagcagccctgtggcacaaactcgggagcctctgggtgcccggcggtcagggcggctctggaaaccctgtgcgtcggcttctaggctgcctgggctcggagacgcgccgcctctcgctgttcctggtcctggtggtcctctcctctcttggggagatggccattccattctttacgggccgcctcactgactggattctacaagatggctcagccgataccttcactcgaaacttaactctcatgtccattctcaccatagccagtgcagtgctggagttcgtgggtgacgggatctataacaacaccatgggccacgtgcacagccacttgcagggagaggtgtttggggctgtcctgcgccaggagacggagtttttccaacagaaccagacaggtaacatcatgtctcgggtaacagaggacacgtccaccctgagtgattctctgagtgagaatctgagcttatttctgtggtacctggtgcgaggcctatgtctcttggggatcatgctctggggatcagtgtccctcaccatggtcaccctgatcaccctgcctctgcttttccttctgcccaagaaggtgggaaaatggtaccagttgctggaagtgcaggtgcgggaatctctggcaaagtccagccaggtggccattgaggctctgtcggccatgcctacagttcgaagctttgccaacgaggagggcgaagcccagaagtttagggaaaagctgcaagaaataaagacactcaaccagaaggaggctgtggcctatgcagtcaactcctggaccactagtatttcaggtatgctgctgaaagtgggaatcctctacattggtgggcagctggtgaccagtggggctgtaagcagtgggaaccttgtcacatttgttctctaccagatgcagttcacccaggctgtggaggtactgctctccatctaccccagagtacagaaggctgtgggctcctcagagaaaatatttgagtacctggaccgcacccctcgctgcccacccagtggtctgttgactcccttacacttggagggccttgtccagttccaagatgtctcctttgcctacccaaaccgcccagatgtcttagtgctacaggggctgacattcaccctacgccctggcgaggtgacggcgctggtgggacccaatgggtctgggaagagcacagtggctgccctgctgcagaatctgtaccagcccaccgggggacagctgctgttggatgggaagccccttccccaatatgagcaccgctacctgcacaggcaggtggctgcagtgggacaagagccacaggtatttggaagaagtcttcaagaaaatattgcctatggcctgacccagaagccaactatggaggaaatcacagctgctgcagtaaagtctggggcccatagtttcatctctggactccctcagggctatgacacagaggtagacgaggctgggagccagctgtcagggggtcagcgacaggcagtggcgttggcccgagcattgatccggaaaccgtgtgtacttatcctggatgatgccaccagtgccctggatgcaaacagccagttacaggtggagcagctcctgtacgaaagccctgagcggtactcccgctcagtgcttctcatcacccagcacctcagcctggtggagcaggctgaccacatcctctttctggaaggaggcgctatccgggaggggggaacccaccagcagctcatggagaaaaaggggtgctactgggccatggtgcaggctcctgcagatgctccagaatga

SEQ ID NO: 1118 - DNA, 2004 bp, Homo sapiens
atgcatcaccaacagcgaatggctgccttagggacggacaaagagctgagtgatttactggatttcagtgcgatgttttcacctcctgtgagcagtgggaaaaatggaccaacttctttggcaagtggacattttactggctcaaatgtagaagacagaagtagctcagggtcctgggggaatggaggacatccaagcccgtccaggaactatggagatgggactccctatgaccacatgaccagcagggaccttgggtcacatgacaatctctctccaccttttgtcaattccagaatacaaagtaaaacagaaaggggctcatactcatcttatgggagagaatcaaacttacagggttgccaccagcagagtctccttggaggtgacatggatatgggcaacccaggaaccctttcgcccaccaaacctggttcccagtactatcagtattctagcaataatccccgaaggaggcctcttcacagtagtgccatggaggtacagacaaagaaagttcgaaaagttcctccaggtttgccatcttcagtctatgctccatcagcaagcactgccgactacaatagggactcgccaggctatccttcctccaaaccagcaaccagcactttccctagctccttcttcatgcaagatggccatcacagcagtgacccttggagctcctccagtgggatgaatcagcctggctatgcaggaatgttgggcaactcttctcatattccacagtccagcagctactgtagcctgcatccacatgaacgtttgagctatccatcacactcctcagcagacatcaattccagtcttcctccgatgtccactttccatcgtagtggtacaaaccattacagcacctcttcctgtacgcctcctgccaacgggacagacagtataatggcaaatagaggaagcggggcagccggcagctcccagactggagatgctctggggaaagcacttgcttcgatctattctccagatcacactaacaacagcttttcatcaaacccttcaactcctgttggctctcctccatctctctcagcaggcacagctgtttggtctagaaatggaggacaggcctcatcgtctcctaattatgaaggacccttacactctttgcaaagccgaattgaagatcgtttagaaagactggatgatgctattcatgttctccggaaccatgcagtgggcccatccacagctatgcctggtggtcatggggacatgcatggaatcattggaccttctcataatggagccatgggtggtctgggctcagggtatggaaccggccttctttcagccaacagacattcactcatggtggggacccatcgtgaagatggcgtggccctgagaggcagccattctcttctgccaaaccaggttccggttccacagcttcctgtccagtctgcgacttcccctgacctgaacccaccccaggacccttacagaggcatgccaccaggactacaggggcagagtgtctcctctggcagctctgagatcaaatccgatgacgagggtgatgagaacctgcaagacacgaaatcttcggaggacaagaaattagatgacgacaagaaggatatcaaatcaattactagcaataatgacgatgaggacctgacaccagagcagaaggcagagcgtgagaaggagcggaggatggccaacaatgcccgagagcgtctgcgggtccgtgacatcaacgaggctttcaaagagctcggccgcatggtgcagctccacctcaagagtgacaagccccagaccaagctcctgatcctccaccaggcggtggccgtcatcctcagtctggagcagcaagtccgagaaaggaatctgaatccgaaagctgcgtgtctgaaaagaagggaggaagagaaggtgtcctcagagcctccccctctctccttggccggcccacaccctggaatgggagacgcatcgaatcacatgggacagatgtaa

SEQ ID NO: 1119 - DNA, 2493 bp, Homo sapiens
atgggctccatgttccggagcgaggaggtggccctggtccagctctttctgcccacagcggctgcctacacctgcgtgagtcggctgggcgagctgggcctcgtggagttcagagacctcaacgcctcggtgagcgccttccagagacgctttgtggttgatgttcggcgctgtgaggagctggagaagaccttcaccttcctgcaggaggaggtgcggcgggctgggctggtcctgcccccgccaaaggggaggctgccggcacccccaccccgggacctgctgcgcatccaggaggagacggagcgcctggcccaggagctgcgggatgtgcggggcaaccagcaggccctgcgggcccagctgcaccagctgcagctccacgccgccgtgctacgccagggccatgaacctcagctggcagccgcccacacagatggggcctcagagaggacgcccctgctccaggcccccggggggccgcaccaggacctgagggtcaactttgtggcaggtgccgtggagccccacaaggcccctgccctagagcgcctgctctggagggcctgccgcggcttcctcattgccagcttcagggagctggagcagccgctggagcaccccgtgacgggcgagccagccacgtggatgaccttcctcatctcctactggggtgagcagatcggacagaagatccgcaagatcacggactgcttccactgccacgtcttcccgtttctgcagcaggaggaggcccgcctcggggccctgcagcagctgcaacagcagagccaggagctgcaggaggtcctcggggagacagagcggttcctgagccaggtgctaggccgggtgctgcagctgctgccgccagggcaggtgcaggtccacaagatgaaggccgtgtacctggccctgaaccagtgcagcgtgagcaccacgcacaagtgcctcattgccgaggcctggtgctctgtgcgagacctgcccgccctgcaggaggccctgcgggacagctcgatggaggagggagtgagtgccgtggctcaccgcatcccctgccgggacatgccccccacactcatccgcaccaaccgcttcacggccagcttccagggcatcgtggatgcctacggcgtgggccgctaccaggaggtcaaccccgctccctacaccatcatcaccttccccttcctgtttgctgtgatgttcggggatgtgggccacgggctgctcatgttcctgttcgccctggccatggtccttgcggagaaccgaccggctgtgaaggccgcgcagaacgagatctggcagactttcttcaggggccgctacctgctcctgcttatgggcctgttctccatctacaccggcttcatctacaacgagtgcttcagtcgcgccaccagcatcttcccctcgggctggagtgtggccgccatggccaaccagtctggctggagtgatgcattcctggcccagcacacgatgcttaccctggatcccaacgtcaccggtgtcttcctgggaccctacccctttggcatcgatcctatttggagcctggctgccaaccacttgagcttcctcaactccttcaagatgaagatgtccgtcatcctgggcgtcgtgcacatggcctttggggtggtcctcggagtcttcaaccacgtgcactttggccagaggcaccggctgctgctggagacgctgccggagctcaccttcctgctgggactcttcggttacctcgtgttcctagtcatctacaagtggctgtgtgtctgggctgccagggccgcctcggcccccagcatcctcatccacttcatcaacatgttcctcttctcccacagccccagcaacaggctgctctacccccggcaggaggtggtccaggccacgctggtggtcctggccttggccatggtgcccatcctgctgcttggcacacccctgcacctgctgcaccgccaccgccgccgcctgcggaggaggcccgctgaccgacaggaggaaaacaaggccgggttgctggacctgcctgacgcatctgtgaatggctggagctccgatgaggaaaaggcagggggcctggatgatgaagaggaggccgagctcgtcccctccgaggtgctcatgcaccaggccatccacaccatcgagttctgcctgggctgcgtctccaacaccgcctcctacctgcgcctgtgggccctgagcctggcccacgcccagctgtccgaggttctgtgggccatggtgatgcgcataggcctgggcctgggccgggaggtgggcgtggcggctgtggtgctggtccccatctttgccgcctttgccgtgatgaccgtggctatcctgctggtgatggagggactctcagccttcctgcacgccctgcggctgcactgggtggaattccagaacaagttctactcaggcacgggctacaagctgagtcccttcaccttcgctgccacagatgactag

SEQ ID NO: 1120 - DNA, 663 bp, Homo sapiens
atgggcgccgcggcccgcaccctgcggctggcgctcggcctcctgctgctggcgacgctgcttcgcccggccgacgcctgcagctgctccccggtgcacccgcaacaggcgttttgcaatgcagatgtagtgatcagggccaaagcggtcagtgagaaggaagtggactctggaaacgacatttatggcaaccctatcaagaggatccagtatgagatcaagcagataaagatgttcaaagggcctgagaaggatatagagtttatctacacggccccctcctcggcagtgtgtggggtctcgctggacgttggaggaaagaaggaatatctcattgcaggaaaggccgagggggacggcaagatgcacatcaccctctgtgacttcatcgtgccctgggacaccctgagcaccacccagaagaagagcctgaaccacaggtaccagatgggctgcgagtgcaagatcacgcgctgccccatgatcccgtgctacatctcctccccggacgagtgcctctggatggactgggtcacagagaagaacatcaacgggcaccaggccaagttcttcgcctgcatcaagagaagtgacggctcctgtgcgtggtaccgcggcgcggcgccccccaagcaggagtttctcgacatcgaggacccataa

SEQ ID NO: 1121 - DNA, 825 bp, Homo sapiens
atgggaaagtctctttctcatttgcctttgcattcaagcaaagaagatgcttatgatggagtcacatctgaaaacatgaggaatggactggttaatagtgaagtccataatgaagatggaagaaatggagatgtctctcagtttccatatgtggaatttacaggaagagatagtgtcacctgccctacttgtcagggaacaggaagaattcctagggggcaagaaaaccaactggtggcattgattccatatagtgatcagagattaaggccaagaagaacaaagctgtatgtgatggcttctgtgtttgtctgtctactcctttctggattggctgtgtttttccttttccctcgctctatcgacgtgaaatacattggtgtaaaatcagcctatgtcagttatgatgttcagaagcgtacaatttatttaaatatcacaaacacactaaatataacaaacaataactattactctgtcgaagttgaaaacatcactgcccaagttcaattttcaaaaacagttattggaaaggcacgcttaaacaacataaccattattggtccacttgatatgaaacaaattgattacacagtacctaccgttatagcagaggaaatgagttatatgtatgatttctgtactctgatatccatcaaagtgcataacatagtactcatgatgcaagttactgtgacaacaacatactttggccactctgaacagatatcccaggagaggtatcagtatgtcgactgtggaagaaacacaacttatcagttggggcagtctgaatatttaaatgtacttcagccacaacagtaa

SEQ ID NO: 1122 - DNA, 477 bp, Homo sapiens
atggcaggcttcctagataattttcgttggccagaatgtgaatgtattgactggagtgagagaagaaatgctgtggcatctgttgtcgcaggtatattgttttttacaggctggtggataatgattgatgcagctgtggtgtatcctaagccagaacagttgaaccatgcctttcacacatgtggtgtattttccacattggctttcttcatgataaatgctgtatccaatgctcaggtgagaggtgatagctatgaaagcggctgtttaggaagaacaggtgctcgagtttggcttttcattggtttcatgttgatgtttgggtcacttattgcttccatgtggattctttttggtgcatatgttacccaaaatactgatgtttatccgggactagctgtgttttttcaaaatgcacttatattttttagcactctgatctacaaatttggaagaaccgaagagctatggacctga

SEQ ID NO: 1123 - DNA, 1911 bp, Homo sapiens; identical to SEQ ID NO: 552

SEQ ID NO: 1124 - DNA, 4866 bp, Homo sapiens
atggccaagtcgggtggctgcggcgcgggagccggcgtgggcggcggcaacggggcactgacctgggtgaacaatgctgcaaaaaaagaagagtcagaaactgccaacaaaaatgattcttcaaagaagttgtctgttgagagagtgtatcagaagaagacacaacttgaacacattcttcttcgtcctgatacatatattgggtcagtggagccattgacgcagttcatgtgggtgtatgatgaagatgtaggaatgaattgcagggaggttacctttgtgccaggtttatacaagatctttgatgaaattttggttaatgctgctgacaataaacagagggataagaacatgacttgtattaaagtttctattgatcctgaatctaacattataagcatttggaataatgggaaaggcattccagtagtagaacacaaggtagagaaagtttatgttcctgctttaatttttggacagcttttaacatccagtaactatgatgatgatgagaaaaaagttacaggtggtcgtaatggttatggtgcaaaactttgtaatattttcagtacaaagtttacagtagaaacagcttgcaaagaatacaaacacagttttaagcagacatggatgaataatatgatgaagacttctgaagccaaaattaaacattttgatggtgaagattacacatgcataacattccaaccagatctgtccaaatttaagatggaaaaacttgacaaggatattgtggccctcatgactagaagggcatatgatttggctggttcgtgtagaggggtcaaggtcatgtttaatggaaagaaattgcctgtaaatggatttcgcagttatgtagatctttatgtgaaagacaaattggatgaaactggggtggccctgaaagttattcatgagcttgcaaatgaaagatgggatgtttgtctcacattgagtgaaaaaggattccagcaaatcagctttgtaaatagtattgcaactacaaaaggtggacggcacgtggattatgtggtagatcaagttgttggtaaactgattgaagtagttaagaaaaagaacaaagctggtgtatcagtgaaaccatttcaagtaaaaaaccatatatgggtttttattaattgccttattgaaaatccaacttttgattctcagactaaggaaaacatgactctgcagcccaaaagttttgggtctaaatgccagctgtcagaaaaattttttaaagcagcctctaattgtggcattgtagaaagtatcctgaactgggtgaaatttaaggctcagactcagctgaataagaagtgttcatcagtaaaatacagtaaaatcaaaggtattcccaaactggatgatgctaatgatgctggtggtaaacattccctggagtgtacactgatattaacagagggagactctgccaaatcactggctgtgtctggattaggtgtgattggacgagacagatacggagtttttccactcaggggcaaaattcttaatgtacgggaagcttctcataaacagatcatggaaaatgctgaaataaataatattattaaaatagttggtctacaatataagaaaagttacgatgatgcagaatctctgaaaaccttacgctatggaaagattatgattatgaccgatcaggatcaagatggttctcacataaaaggcctgcttattaatttcatccatcacaattggccatcacttttgaagcatggttttcttgaagagttcattactcctattgtaaaggcaagcaaaaataagcaggaactttccttctacagtattcctgaatttgacgaatggaaaaaacatatagaaaaccagaaagcctggaaaataaagtactataaaggattgggtactagtacagctaaagaagcaaaggaatattttgctgatatggaaaggcatcgcatcttgtttagatatgctggtcctgaagatgatgctgccattaccttggcatttagtaagaagaagattgatgacagaaaagaatggttaacaaattttatggaagaccggagacagcgtaggctacatggcttaccagagcaatttttatatggtactgcaacaaagcatttgacttataatgatttcatcaacaaggaattgattctcttctcaaactcagacaatgaaagatctataccatctcttgttgatggctttaaacctggccagcggaaagttttatttacctgtttcaagaggaatgataaacgtgaagtaaaagttgcccagttggctggctctgttgctgagatgtcggcttatcatcatggagaacaagcattgatgatgactattgtgaatttggctcagaactttgtgggaagtaacaacattaacttgcttcagcctattggtcagtttggaactcggcttcatggtggcaaagatgctgcaagccctcgttatattttcacaatgttaagcactttagcaaggctactttttcctgctgtggatgacaacctccttaagttcctttatgatgataatcaacgtgtagagcctgagtggtatattcctataattcccatggttttaataaatggtgctgagggcattggtactggatgggcttgtaaactacccaactatgatgctagggaaattgtgaacaatgtcagacgaatgctagatggcctggatcctcatcccatgcttccaaactacaaaaactttaaaggcacgattcaagaacttggtcaaaaccagtatgcagtcagtggtgaaatatttgtagtggacagaaacacagtagaaattacagagcttccagttagaacttggacacaggtatataaagaacaggttttagaacctatgctaaatggaacagataaaacaccagcattaatttctgattataaagaatatcatactgacacaactgtgaaatttgtggtgaaaatgactgaagagaaactagcacaagcagaagctgctggactgcataaagtttttaaacttcaaactactcttacttgtaattccatggtactttttgatcatatgggatgtctgaagaaatatgaaactgtgcaagacattctgaaagaattctttgatttacgattaagttattacggtttacgtaaggagtggcttgtgggaatgttgggagcagaatctacaaagcttaacaatcaagcccgtttcattttagagaagatacaagggaaaattactatagagaataggtcaaagaaagatttgattcaaatgttagtccagagaggttatgaatctgacccagtgaaagcctggaaagaagcacaagaaaaggcagcagaagaggatgaaacacaaaaccagcatgatgatagttcctccgattcaggaactccttcaggcccagattttaattatattttaaatatgtctctgtggtctcttactaaagaaaaagttgaagaactgattaaacagagagatgcaaaagggcgagaggtcaatgatcttaaaagaaaatctccttcagatctttggaaagaggatttagcggcatttgttgaagaactggataaagtggaatctcaagaacgagaagatgttctggctggaatgtctggaaaagcaattaaaggtaaagttggcaaacctaaggtgaagaaactccagttggaagagacaatgccctcaccttatggcagaagaataattcctgaaattacagctatgaaggcagatgccagcaaaaagttgctgaagaagaagaagggtgatcttgatactgcagcagtaaaagtggaatttgatgaagaattcagtggagcaccagtagaaggtgcaggagaagaggcattgactccatcagttcctataaataaaggtcccaaacctaagagggagaagaaggagcctggtaccagagtgagaaaaacacctacatcatctggtaaacctagtgcaaagaaagtgaagaaacggaatccttggtcagatgatgaatccaagtcagaaagtgatttggaagaaacagaacctgtggttattccaagagattctttgcttaggagagcagcagccgaaagacctaaatacacatttgatttctcagaagaagaggatgatgatgctgatgatgatgatgatgacaataatgatttagaggaattgaaagttaaagcatctcccataacaaatgatggggaagatgaatttgttccttcagatgggttagataaagatgaatatacattttcaccaggcaaatcaaaagccactccagaaaaatctttgcatgacaaaaaaagtcaggattttggaaatctcttctcatttccttcatattctcagaagtcagaagatgattcagctaaatttgacagtaatgaagaagattctgcttctgttttttcaccatcatttggtctgaaacagacagataaagttccaagtaaaacggtagctgctaaaaagggaaaaccgtcttcagatacagtccctaagcccaagagagccccaaaacagaagaaagtagtagaggctgtaaactctgactcggattcagaatttggcattccaaagaagactacaacaccaaaaggtaaaggccgaggggcaaagaaaaggaaagcatctggctctgaaaatgaaggcgattataaccctggcaggaaaacatccaaaacaacaagcaagaaaccgaagaagacatcttttgatcaggattcagatgtggacatcttcccctcagacttccctactgagccaccttctctgccacgaaccggtcgggctaggaaagaagtaaaatattttgcagagtctgatgaagaagaagatgatgttgattttgcaatgtttaattaa

SEQ ID NO: 1125 - DNA, 1692 bp, Homo sapiens
atgggactccaagcctgcctcctagggctctttgccctcatcctctctggcaaatgcagttacagcccggagcccgaccagcggaggacgctgcccccaggctgggtgtccctgggccgtgcggaccctgaggaagagctgagtctcacctttgccctgagacagcagaatgtggaaagactctcggagctggtgcaggctgtgtcggatcccagctctcctcaatacggaaaatacctgaccctagagaatgtggctgatctggtgaggccatccccactgaccctccacacggtgcaaaaatggctcttggcagccggagcccagaagtgccattctgtgatcacacaggactttctgacttgctggctgagcatccgacaagcagagctgctgctccctggggctgagtttcatcactatgtgggaggacctacggaaacccatgttgtaaggtccccacatccctaccagcttccacaggccttggccccccatgtggactttgtggggggactgcaccgttttcccccaacatcatccctgaggcaacgtcctgagccgcaggtgacagggactgtaggcctgcatctgggggtaaccccctctgtgatccgtaagcgatacaacttgacctcacaagacgtgggctctggcaccagcaataacagccaagcctgtgcccagttcctggagcagtatttccatgactcagacctggctcagttcatgcgcctcttcggtggcaactttgcacatcaggcatcagtagcccgtgtggttggacaacagggccggggccgggccgggattgaggccagtctagatgtgcagtacctgatgagtgctggtgccaacatctccacctgggtctacagtagccctggccggcatgagggacaggagcccttcctgcagtggctcatgctgctcagtaatgagtcagccctgccacatgtgcatactgtgagctatggagatgatgaggactccctcagcagcgcctacatccagcgggtcaacactgagctcatgaaggctgccgctcggggtctcaccctgctcttcgcctcaggtgacagtggggccgggtgttggtctgtctctggaagacaccagttccgccctaccttccctgcctccagcccctatgtcaccacagtgggaggcacatccttccaggaacctttcctcatcacaaatgaaattgttgactatatcagtggtggtggcttcagcaatgtgttcccacggccttcataccaggaggaagctgtaacgaagttcctgagctctagcccccacctgccaccatccagttacttcaatgccagtggccgtgcctacccagatgtggctgcactttctgatggctactgggtggtcagcaacagagtgcccattccatgggtgtccggaacctcggcctctactccagtgtttggggggatcctatccttgatcaatgagcacaggatccttagtggccgcccccctcttggctttctcaacccaaggctctaccagcagcatggggcaggactctttgatgtaacccgtggctgccatgagtcctgtctggatgaagaggtagagggccagggtttctgctctggtcctggctgggatcctgtaacaggctggggaacacccaacttcccagctttgctgaagactctactcaacccctga

SEQ ID NO: 1126 - DNA, 1656 bp, Homo sapiens
atgatcagcccagaccccaggccctcccctggcttggcccggtgggctgagagctatgaggccaagtgtgagcgcaggcaagagatccgtgaaagccgccgctgccgtcccaatgtgaccacttgccgccaggtggggaagacgctgaggatccaacagagagagcagctccagagagctcgactgcagcagttcttcaggaggaggaacctggagctagaggagaagggcaaagcgcagcatccccaggccagggagcaagggccctccaggcggccaggacaggtgactgtcctcaaggaacccttgtcttgtgccagaaggatttcttctcccagagagcaggtgacaggcaccagctctgaagtctttccagcccagcatcctcctccctcaggcatctgcagggatctgtctgaccacctctcctcacaggctgggggccttcctccacaggacactcccatcaagaagccacccaaacaccaccgtggtactcagacaaaggcagaaggaccaacaattaagaacgatgccagtcagcaaaccaattacggagttgcagttctggataaggaaatcatccagctttctgattacctcaaagaggccctacaaagggagctggtcctaaaacagaaaatggtgattctccaagacctactgtccactctgattcaggcctctgacagctcttggaagggacagcttaatgaagacaaactgaaggggaaactgagatccttagaaaaccagctatacacctgtacccagaaatactccccttggggaatgaaaaaagtactactggagatggaagaccagaaaaacagctatgagcagaaggccaaggagtcactgcagaaagtgctggaggagaaaatgaatgcagagcagcaactacagagcacacagcgatccctggccctggcagagcagaagtgtgaagagtggaggagccagtatgaggctctgaaggaggactggaggacccttgggacccagcacagggagctggagagccaactccacgtgcttcagtccaaactgcagggagcagatagcagggacttacagatgaaccaggccctgcgatttttggaaaatgagcaccagcaactgcaggccaagattgaatgcctgcaaggggacagagacctgtgcagcttggatacccaggacctacaagatcaactaaaaaggtcagaggcagagaaactcaccctggtgaccagagtacagcagttgcagggtttgcttcaaaatcaatccttacagcttcaagaacaggagaaactcttaacaaagaaagatcaggctttgcccgtgtggagtccaaagtccttccctaacgaagtggagcctgagggtacagggaaggagaaagactgggatctcagagaccagctgcaaaagaagactttgcagctccaggccaaggaaaaggagtgcagagaactgcattcagaattagacaacctcagtgacgagtatctctcctgcctgcgtaagctgcagcactgtcgagaagagctgaaccagagccagcagctgcctcccagaaggcaatgtgggcgatggctcccagtgctgatggtggtgattgctgcagcactggcagtgttcctggccaataaagacaacctgatgatctga

SEQ ID NO: 1127 - DNA, 1119 bp, Homo sapiens
atgcgggtcggtccggtgcgctctgccatgagcggcgcctcgcagccccgcggcccggccctgctcttcccagccacccgaggcgtcccggccaaacgcctgctggacgccgacgacgcggcggctgtggcggccaagtgcccgcgcctctccgagtgctccagccccccggactacctcagcccccccggctcgccctgcagcccgcagcccccgcctgccgctccgggggccggcggaggctccgggagcgcgccggggcccagccgcatcgccgactacctgctgctgcccctagccgagcgcgagcatgtgtcccgggcgctgtgcatccacactggacgcgagctgcgctgcaaggtgtttcccattaaacactaccaggacaaaatcaggccttacatccagctgccatcgcacagcaacattactggcattgtggaagtgatccttggggaaaccaaggcctatgtcttctttgagaaggactttggggacatgcactcctatgtgcgaagccggaagaggctgcgggaagaggaagccgcccggctcttcaagcagattgtctccgccgtcgcccactgccaccagtcagccatcgtgctgggggacctgaagcttaggaagttcgtcttctccacggaggagagaacccagcttagactagaaagtctagaagacacacacataatgaagggggaagatgatgctttgtcagacaaacatggctgcccagcctacgtgagccctgagatcctcaacaccactgggacctactccggaaaggctgcggacgtttggagcctgggggtgatgctctacacccttctggttggacgataccccttccatgactcagaccccagtgcccttttctccaaaattcggcgtggacagttctgcattcctgagcacatttcccccaaagccaggtgcctcattcgcagcctcttgagacgggagccctccgagagactcactgcccccgagatcctactgcacccctggtttgagtccgtcttggaacccgggtacatcgactcagaaataggaacttcagaccagattgttccagagtaccaggaggacagtgacattagttccttcttctgctaa

SEQ ID NO: 1128 - DNA, 1404 bp, Homo sapiens
atggcgtccgtggcggctgcacgagcagttcccgtgggcagtgggctcaggggcctgcaacggaccctacctcttgtagtgattctcggggccacgggcaccggcaaatccacgctggcgttgcagctaggccagcggctcggcggtgagatcgtcagcgctgactccatgcaggtctatgaaggcctagacatcatcaccaacaaggtttctgcccaagagcagagaatctgccggcaccacatgatcagctttgtggatcctcttgtgaccaattacacagtggtggacttcagaaatagagcaactgctctgattgaagatatatttgcccgagacaaaattcctattgttgtgggaggaaccaattattacattgaatctctgctctggaaagttcttgtcaataccaagccccaggagatgggcactgagaaagtgattgaccgaaaagtggagcttgaaaaggaggatggtcttgtacttcacaaacgcctaagccaggtggacccagaaatggctgccaagctgcatccacatgacaaacgcaaagtggccaggagcttgcaagtttttgaagaaacaggaatctctcatagtgaatttctccatcgtcaacatacggaagaaggtggtggtccccttggaggtcctctgaagttctctaacccttgcatcctttggcttcatgctgaccaggcagttctagatgagcgcttggataagagggtggatgacatgcttgctgctgggctcttggaggaactaagagattttcacagacgctataatcagaagaatgtttcggaaaatagccaggactatcaacatggtatcttccaatcaattggcttcaaggaatttcacgagtacctgatcactgagggaaaatgcacactggagactagtaaccagcttctaaagaaaggtattgaggctctgaaacaagtaactaagagatatgcccggaaacaaaaccgatgggttaaaaaccgttttttgagcagacctggtcccattgtcccccctgtctatggcttagaggtatctgatgtctcgaagtgggaagagtctgttcttgaacctgctcttgaaatcgtgcaaagtttcatccagggccacaagcctacagccactccaataaagatgccatacaatgaagctgagaacaagagaagttatcacctgtgtgacctctgtgatcgaatcatcattggggatcgcgaatgggcagcgcacataaaatccaaatcccacttgaaccaactgaagaaaagaagaagattggactcagatgctgtcaacaccatagaaagtcagagtgtttccccagaccataacaaagaacctaaagagaagggatccccagggcagaatgatcaagagctgaaatgcagcgtttaa

SEQ ID NO: 1129 - DNA, 1617 bp, Homo sapiens
atggaggaatctgtaaaccaaatgcagccactgaatgagaagcagatagccaattctcaggatggatatgtatggcaagtcactgacatgaatcgactacaccggttcttatgtttcggttctgaaggtgggacttattatatcaaagaacagaagttgggccttgaaaatgctgaagctttaattagattgattgaagatggcagaggatgtgaagtgatacaagaaataaagtcatttagtcaagaaggcagaaccacaaagcaagagcctatgctctttgcacttgccatttgttcccagtgctccgacataagcacaaaacaagcagcatttaaagctgtttctgaagtttgtcgcattcctacccatctctttacttttatccagtttaagaaagatctgaaggaaagcatgaaatgtggcatgtggggtcgtgccctccggaaggctatagcggactggtacaatgagaaaggtggcatggcccttgctctggcagttacaaaatataaacagagaaatggctggtctcacaaagatctattaagattgtcacatcttaaaccttccagtgaaggacttgcaattgtgaccaaatatattacaaagggctggaaagaagttcatgaattgtataaagaaaaagcactctctgtggagactgaaaaattattaaagtatctggaggctgtagagaaagtgaagcgcacaagagatgagctagaagtcattcatctaatagaagaacatagattagttagagaacatcttttaacaaatcacttaaagtctaaagaggtatggaaggctttgttacaagaaatgccgcttactgcattactaaggaatctaggaaagatgactgctaattcagtacttgaaccaggaaattcagaagtatctttagtatgtgaaaaactgtgtaatgaaaaactattaaaaaaggctcgtatacatccatttcatattttgatcgcattagaaacttacaagacaggtcatggtctcagagggaaactgaagtggcgccctgatgaagaaattttgaaagcattggatgctgctttttataaaacatttaagacagttgaaccaactggaaaacgtttcttactagctgttgatgtcagtgcttctatgaaccaaagagttttgggtagtatactcaacgctagtacagttgctgcagcaatgtgcatggttgtcacacgaacagaaaaagattcttatgtagttgctttttccgatgaaatggtaccatgtccagtgactacagatatgaccttacaacaggttttaatggctatgagtcagatcccagcaggtggaactgattgctctcttccaatgatctgggctcagaagacaaacacacctgctgatgtcttcattgtattcactgataatgagacctttgctggaggtgtccatcctgctattgctctgagggagtatcgaaagaaaatggatattccagctaaattgattgtttgtggaatgacatcaaatggtttcaccattgcagacccagatgatagaggcatgttggatatgtgcggctttgatactggagctctggatgtaattcgaaatttcacattagatatgatttaa

SEQ ID NO: 1130 - DNA, 2394 bp, Homo sapiens
atggcggcggcgccggtagcggctgggtctggagccggccgagggagacggtcggcagccacagtggcggcttggggcggatggggcggccggccgcggcctggtaacattctgctgcagctgcggcagggccagctgaccggccggggcctggtccgggcggtgcagttcactgagacttttttgacggagagggacaaacaatccaagtggagtggaattcctcagctgctcctcaagctgcacaccaccagccacctccacagtgactttgttgagtgtcaaaacatcctcaaggaaatttctcctcttctctccatggaggctatggcatttgttactgaagagaggaaacttacccaagaaaccacttatccaaatacttacatttttgacttgtttggaggtgttgatcttcttgtagaaattcttatgaggcctacgatctctatccggggacagaaactgaaaataagtgatgaaatgtccaaggactgcttgagtatcctgtataatacctgtgtctgtacagagggagttacaaagcgtttggcagaaaagaatgactttgtgatcttcctgtttacattgatgacaagtaagaagacattcttacaaacagcaaccctcattgaagatattttgggtgttaaaaaggaaatgatccgactagatgaagtccccaatctgagttccttagtatccaatttcgatcagcagcagctcgctaatttctgccggattctggctgtcaccatttcagagatggatacagggaatgatgacaagcacacgcttcttgccaaaaatgctcaacagaagaagagcttgagtttggggccttctgcagctgaaatcaatcaagcggcccttctcagcattcctggctttgttgagcggctttgcaaactggcgactcgaaaggtgtcagagtcaacgggcacagccagcttccttcaggagttggaagagtggtacacatggctagacaatgctttggtgctagatgccctgatgcgagtggccaatgaggagtcagagcacaatcaagcctccattgtgttccctcctccaggggcttctgaggagaatggcctgcctcacacgtcagccagaacccagctgccccagtcaatgaagattatgcatgagatcatgtacaaactggaagtgctctatgtcctctgcgtgctgctgatggggcgtcagcgaaaccaggttcacagaatgattgcagagttcaagctgatccctggacttaataatttgtttgacaaactgatttggaggaagcattcagcatctgcccttgtcctccatggtcacaaccagaactgtgactgtagcccggacatcaccttgaagatacagtttttgaggcttcttcagagcttcagtgaccaccacgagaacaagtacttgttactcaacaaccaggagctgaatgaactcagtgccatctctctcaaggccaacatccctgaggtggaagctgtcctcaacaccgacaggagtttggtgtgtgatgggaagaggggcttattaactcgtctgctgcaggtcatgaagaaggagccagcagagtcgtctttcaggttttggcaagctcgggctgtggagagtttcctccgagggaccacctcctatgcagaccagatgttcctgctgaagcgaggcctcttggagcacatcctttactgcattgtggacagcgagtgtaagtcaagggatgtgctccagagttactttgacctcctgggggagctgatgaagttcaacgttgatgcattcaagagattcaataaatatatcaacaccgatgcaaagttccaggtattcctgaagcagatcaacagctccctggtggactccaacatgctggtgcgctgtgtcactctgtccctggaccgatttgaaaaccaggtggatatgaaagttgccgaggtactgtctgaatgccgcctgctcgcctacatatcccaggtgcccacgcagatgtccttcctcttccgcctcatcaacatcatccacgtgcagacgctgacccaggagaacgtcagctgcctcaacaccagcctggtgatcctgatgctggcccgacggaaagagcggctgcccctgtacctgcggctgctgcagcggatggagcacagcaagaagtaccccggcttcctgctcaacaacttccacaacctgctgcgcttctggcagcagcactacctgcacaaggacaaggacagcacctgcctagagaacagctcctgcatcagcttctcatactggaaggagacagtgtccatcctgttgaacccggaccggcagtcaccctctgctctcgttagctacattgaggagccctacatggacatagacagggacttcactgaggagtga

SEQ ID NO: 1131 - DNA, 510 bp, Homo sapiens; identical to SEQ ID NO: 90

SEQ ID NO: 1132 - DNA, 3426 bp, Homo sapiens
atggcggcggcagtaggggttcgtggccggtacgagctgccgccttgctccggcccaggctggctcctcagcctttccgccttgctgagtgtggcggcacgaggggccttcgccaccacgcactgggtcgtcacggaggacgggaaaatccagcagcaggtggattcaccaatgaacttgaagcatcctcatgacctagtcatattaatgagacaagaagcaacagttaactacctcaaagaattagagaaacaattagttgctcaaaaaattcacatagaagagaatgaggacagagacacaggactggaacagagacataataaagaagacccagactgcatcaaagccaaggtgcccttaggggacctggatctatatgatggcacatacataactttggagagcaaagacatcagtcctgaagattatatagacacagaatctcctgtccctccagacccagagcaacctgattgtactaaaattctagaacttccatatagtatacatgcttttcagcacttgagaggtgtacaggagagagttaatctttctgcacctctgctacctaaagaagacccaatcttcacatatttatctaaacggttaggaaggagtatagatgacataggtcacctcattcatgaaggcctacagaagaacacttcctcgtgggtactgtataacatggcttcattttactggagaattaagaatgagccatatcaggtagtagaatgtgccatgcgagcacttcacttctcttccaggcacaataaagacattgccctggtcaacctggcaaacgttctacacagagcacacttctctgctgatgctgctgtcgtggtccatgcagctctggatgacagtgacttcttcaccagctattacactttggggaatatatatgcaatgcttggggaatataaccactcagtgctctgttatgaccacgctttgcaggccagacctgggtttgagcaagctataaagaggaagcatgctgtcctatgtcagcaaaaactggagcagaaattggaggctcagcatagatctctccagcgaacactgaatgagttaaaagagtatcaaaagcagcatgaccactacctgagacagcaggaaatcctagaaaaacataaactgattcaggaggagcaaatcttaagaaatatcattcatgagactcagatggcaaaagaggcacaattaggaaatcatcagatatgccgactggtcaaccagcagcatagtttacattgccagtgggaccagcctgtacgctatcatcgtggagatatctttgaaaatgtggactatgttcagtttggtgaggattcatcaacctccagtatgatgtctgtgaactttgatgttcaatcaaatcagagtgatatcaatgattcggtcaagtcttctcccgtagcccattctattctctggatttggggcagggactctgatgcatatagggacaaacagcatattctatggcctaaaagagcagattgtacagaaagctaccctagagtccctgttggtggggaattgccaacgtattttctgcctccggaaaacaaaggactcaggatccacgaactcagcagtgatgattattctacagaagaagaggcccaaacccctgactgttccataactgacttcagaaaaagccacactctgtcctacttagtcaaagaattagaggttcgcatggatctgaaagccaaaatgccagatgaccatgcacgaaaaattttgctttcccgtattaataactatactatcccagaagaagaaattgggtctttcttatttcatgctattaataagccaaatgctcctatctggctcatactcaatgaagctggactatactggagagcagtaggaaatagcacttttgctattgcctgtcttcagagggctttgaatttagctccacttcaataccaagatgttcctcttgtcaacttggccaaccttttgattcattacggccttcatcttgatgccactaagctgctacttcaagctttggccatcaatagctctgagcctctgacctttttgagcctgggaaatgcttaccttgctctgaagaatatcagtggggcacttgaggcctttagacaggccttgaaattaaccaccaaatgtccagagtgtgaaaacagcctgaagttgatccgctgtatgcagttttatccttttctgtacaacatcacttcttctgtttgcagtggtacggtggttgaggagagcaatggttctgatgagatggagaattcagatgaaaccaaaatgtcagaagaaatactggctttggtggatgaatttcaacaggcatggcctttggaaggctttgggggtgcactagagatgaaagggcggcgtctagacttacaaggaatacgggtgctgaagaaaggtccccaggatggagtggccagaagctcttgctatggagactgcagaagtgaagatgatgaagcaacagaatggattacattccaggtcaaacgtgtaaagaaacccaaaggagatcataagaaaactcctgggaaaaaagtagaaacaggtcagatagaaaatggacatcgttaccaagcaaacctagagatcactggccccaaggtggcatctcctgggccacaaggaaaaaaacgtgactaccagcgtctgggatggcccagcccggacgaatgcctcaaactccgctgggtagagctgactgccatcgtgagtacctggcttgcagtttcttcaaaaaacattgacatcacagaacacatagattttgccacccctatacagcagccagcaatggagcctctttgcaatggcaatctccccacgagtatgcataccctggaccacttgcatggggtttccaaccgagccagcctgcactacacaggggagagtcagttaacagaggtattacaaaatctcggcaaagaccaatatccacaacagtcgcttgaacagattggcacccgaattgccaaagttttggaaaagaaccagacgtcctgggtcctctccagcatggcagccctctactggagggtgaaaggccaaggaaagaaggcaatcgactgcctccgccaggctctgcactatgcgccacaccagatgaaggatgtgcccctgattagcctggccaacatcttgcacaatgccaagctctggaatgacgccgtcatagtagccaccatggcagtagagatcgcaccacactttgctgtgaaccacttcactctgggcaatgtctacgtggcaatggaagaatttgaaaaagcactggtgtggtatgaatccacattgaagcttcagcccgagtttgtcccagccaagaaccgaatccagaccatccagtgtcacttaatgctgaagaagggacggcgctctccttag

SEQ ID NO: 1133 - DNA, 1356 bp, Homo sapiens
atgcgtgagtgcatctccatccacgttggccaggctggtgtccagattggcaatgcctgctgggagctctactgcctggaacacggcatccagcccgatggccagatgccaagtgacaagaccattgggggaggagatgactccttcaacaccttcttcagtgagacgggcgctggcaagcacgtgccccgggctgtgtttgtagacttggaacccacagtcattgatgaagttcgcactggcacctaccgccagctcttccaccctgagcagctcatcacaggcaaggaagatgctgccaataactatgcccgagggcactacaccattggcaaggagatcattgaccttgtgttggaccgaattcgcaagctggctgaccagtgcaccggtcttcagggcttcttggttttccacagctttggtgggggaactggttctgggttcacctccctgctcatggaacgtctctcagttgattatggcaagaagtccaagctggagttctccatttacccagcaccccaggtttccacagctgtagttgagccctacaactccatcctcaccacccacaccaccctggagcactctgattgtgccttcatggtagacaatgaggccatctatgacatctgtcgtagaaacctcgatatcgagcgcccaacctacactaaccttaaccgccttattagccagattgtgtcctccatcactgcttccctgagatttgatggagccctgaatgttgacctgacagaattccagaccaacctggtgccctacccccgcatccacttccctctggccacatatgcccctgtcatctctgctgagaaagcctaccatgaacagctttctgtagcagagatcaccaatgcttgctttgagccagccaaccagatggtgaaatgtgaccctcgccatggtaaatacatggcttgctgcctgttgtaccgtggtgacgtggttcccaaagatgtcaatgctgccattgccaccatcaaaaccaagcgcagcatccagtttgtggattggtgccccactggcttcaaggttggcatcaactaccagcctcccactgtggtgcctggtggagacctggccaaggtacagagagctgtgtgcatgctgagcaacaccacagccattgctgaggcctgggctcgcctggaccacaagtttgacctgatgtatgccaagcgtgcctttgttcactggtacgtgggtgaggggatggaggaaggcgagttttcagaggcccgtgaagatatggctgcccttgagaaggattatgaggaggttggtgtggattctgttgaaggagagggtgaggaagaaggagaggaatactaa

SEQ ID NO: 1134 - DNA, 462 bp, Homo sapiens; identical to SEQ ID NO: 565

SEQ ID NO: 1135 - DNA, 258 bp, Homo sapiens
atgtcgaaggtttcctttaagatcacgctgacgtcggacccacggctgccgtacaaagtactcagtgttcctgaaagtacacctttcacagcagtcttaaagtttgcagcagaagaatttaaagttcctgctgcaacaagtgcaattattaccaatgatggaataggaataaatcctgcacagactgctggaaatgtttttctaaaacatggttcagaactgcggattattcctagagatcgtgttggaagttgttaa

SEQ ID NO: 1136 - DNA, 933 bp, Homo sapiens
atggcggccacgggagccaatgcagagaaagctgaaagtcacaatgattgccccgtcagacttttaaatccaaacatagcaaaaatgaaagaagatattctctatcatttcaatctcaccactagcagacacaatttcccagccttgtttggagatgtgaagtttgtgtgtgttggtggaagcccctcccggatgaaagccttcatcaggtgcgttggtgcagagctgggccttgactgcccaggtagagactatcccaacatctgtgcgggaactgaccgctatgccatgtataaagtaggaccggtgctgtctgtcagtcatggtatgggcattccttctatctcaatcatgttgcatgagctcataaagctgctgtactatgcccggtgctccaacgtcactatcatccgcattggcacttctggtgggataggtctggagcccggcactgtggtcataacagagcaggcagtggatacctgcttcaaggcagagtttgagcagattgtcctggggaagcgggtcatccggaaaacggaccttaacaagaagctggtgcaggagctgttgctgtgttctgcagagctgagcgagttcaccacagtggtggggaacaccatgtgcaccttggacttctatgaagggcaaggccgtctggatggggctctctgctcctacacggagaaggacaagcaggcgtatctggaggcagcctatgcagccggcgtccgcaatatcgagatggagtcctcggtgtttgccgccatgtgcagcgcctgcggcctccaagcggccgtggtgtgtgtcaccctcctgaaccgcctggaaggggaccagatcagcagccctcgcaatgtgctcagcgagtaccagcagaggccgcagcggctggtgagctacttcatcaagaagaaactgagcaaggcctga

SEQ ID NO: 1137 - DNA, 10641 bp, Homo sapiens
atgtgcgagaactgcgcagacctggtggaggtgttaaatgaaatatcagatgtagaaggtggtgatggactgcagctcagaaaggaacatactctcaaaatatttacttatatcaattcctggacacagaggcaatgtctatgctgcttcaaggaatataagcatttggagatttttaatcaagtagtgtgtgcacttattaacttagtgattgcccaagttcaagtgctccgggaccagctttgtaaacattgtactaccattaacatagattccacgtggcaagatgagagtaatcaagcagaagaaccactgaatatagatagagagtgtaatgaaggaagtacagaaagacaaaaatcaatagaaaaaaaatcaaactctacaagaatttgtaatctgactgaggaggaatcttcaaagagttctgatccttttagtttatggagtacagatgagaaggaaaaactcttactatgtgtggcaaaaatttttcaaattcagtttcccttatatactgcttacaagcataatactcaccctactattgaggatatatcaactcaagaaagtaacatattaggggcattctgtgatatgaatgatgtagaagtaccattgcatttgcttcgttatgtatgtttgttttgtgggaaaaatggcctttctctcatgaaggattgctttgaatatggaactcctgaaactttgccatttcttatagcacatgcgtttattacagttgtgtctaatattagaatatggctacatattcccgctgtcatgcagcacattataccttttaggacctatgttattaggtatttatgcaagctctcggatcaggagttacgacagagtgcagctcgtaacatggctgacttaatgtggagcacagtcaaagaaccattggatacaacattatgctttgataaagaaagcctagatcttgcatttaagtactttatgtcacctactttgactatgaggttggctggattgagtcagataacaaatcaactccataccttcaatgatgtgtgcaataatgaatcattagtatcggacacagaaacgtccattgcaaaagaacttgcagactggcttattagcaacaatgtggtggagcatatatttggaccaaatttacatattgagattatcaaacagtgccaagtgattttgaattttttggcagcagaagggcgactgagtactcaacatattgactgtatttgggctgcagcacagttgaaacattgtagtcggtatatacatgacttatttccttcactcatcaagaatttggatcccgtaccacttagacatctacttaatctggtctcagctcttgagccaagtgttcatactgaacagacactgtacttggcatccatgttaattaaagcactgtggaataacgcactagcagctaaggctcagttatctaaacagagttcttttgcatctttattaaatactaatattcccattggaaataagaaagaggaagaagagcttagaagaacagctccatcaccttggtcacctgcagctagtcctcaaagcagtgataatagcgatacacatcaaagtggaggtagtgacattgaaatggatgagcaacttattaatagaaccaaacatgtgcaacaacgactttcagacacagaggaatccatgcagggaagttctgacgaaactgccaacagtggtgaagatggaagcagtggtcctggtagcagtagtgggcatagtgatggatctagcaatgaggttaattctagccacgcaagccagtcagctgggagccctggcagtgaggtacagtcagaagacattgcagatattgaagccctcaaagaggaagatgaagacgatgatcatggtcataatcctcccaaaagcagttgtggtacagatcttcggaatagaaagttagagagtcaagcaggcatttgcctgggggactcccaaggcatgtcagaaagaaatgggacaagcagcggaacaggaaaggacctggtttttaacactgaatcattgccatcagtagataatcgaatgcgaatgctggatgcttgttcacactctgaagacccagaacatgatatttcaggggaaatgaatgctactcatatagcacaagggtctcaggagtcttgtatcacacgaactggggacttccttggggagactattgggaatgaattatttaattgtcgacaatttattggtccacagcatcaccaccaccaccaccaccatcaccaccaccacgatgggcatatggttgatgatatgctaagtgcagatgatgtcagttgtagtagctcccaggttagtgcaaaatcagaaaaaaatatggctgattttgatggtgaagaatctggatgtgaagaggagctagttcagattaattcacatgcggaactgacatctcacctccaacaacatcttcccaatttagcttccatttaccatgaacatcttagtcaaggacctgtagttcataaacatcaattcaacagtaatgctgttacagacattaatttggataatgtttgcaagaaaggaaatactttgttgtgggatatagtccaagatgaagatgcagttaatctttctgaaggattaataaatgaagcagagaaacttctttgttcgttagtatgttggtttacagatagacaaattcgaatgagattcattgaaggttgccttgaaaacttgggaaacaacagatcagtagtaatttcacttcgtcttcttccaaaactatttggtacttttcagcagtttgggagcagttacgatacacactggataacaatgtgggcagaaaaagaactgaacatgatgaagcttttctttgataatttggtatactacattcaaactgtgagagaaggaagacaaaaacatgcactgtacagccatagtgctgaagttcaagttcgtcttcaattcttgacttgtgtattttcaactctgggatcacctgatcatttcaggttaagtttagagcaagttgacatcttatggcattgtttagtagaagattctgaatgttatgatgatgcactccattggtttttaaatcaagttcgaagtaaagatcaacatgctatgggtatggaaacctacaaacatcttttcctggagaagatgccccagctaaaacctgaaacaattagcatgactggcttaaacctgtttcagcatctctgtaacttggctcgattggctaccagtgcctatgatggttgttcaaattctgagctgtgtggtatggaccaattttggggcattgctttaagagcacaatctggtgatgtcagtcgagcagctatccagtatattaactcctattatattaatggtaaaacaggtttggagaaggagcaagaatttattagtaagtgcatggagagtcttatgatagcttctagcagtcttgaacaggaatcacactcaagtctcatggttatagaaagaggactccttatgctgaagacacatctggaagcgtttaggagaaggtttgcatatcatctgagacagtggcaaattgaaggcactggtattagtagtcatttgaaagcactgagtgacaaacagtctctgccgctaagggttgtatgccagccagctggacttcctgacaagatgactattgaaatgtatcctagtgaccaggtagcagatcttagggctgaagtaactcattggtatgaaaatttacagaaagaacaaataaatcaacaagctcagcttcaggagtttggtcaaagcaaccgaaaaggagagtttcctggaggcctcatgggacctgtcaggatgatttcatctggacacgagttaacaacagattatgatgaaaaagcacttcatgagcttggttttaaggatatgcagatggtatttgtatctttgggtgcaccaaggagagagcggaaaggggaaggtgttcagctgccagcatcttgcctcccaccccctcagaaggacaacattccaatgcttttgcttttacaagagcctcatttaactactctttttgatttattagagatgcttgcatcatttaaaccaccctcaggaaaagtggcagtggatgatagtgagagcttacgatgtgaagaacttcatcttcatgcagaaaatctgtctaggcgggtctgggagctactgatgcttcttcctacatgtcctaatatgttgatggcattccagaatatctcagatgagcagagtaatgatggatttaattggaaagaacttctcaaaattaagagcgcccacaagctattgtatgctctggaaattattgaagcactgggaaaacctaatagaagaataaggagggagtctacgggaagttacagtgatctttatccagattcagatgattcaagtgaagatcaagtggaaaatagtaaaaattcctggagttgcaagtttgttgctgctggagggcttcaacagttattagaaatttttaattctggaattctagagcctaaagagcaggaatcatggactgtgtggcagctagactgtcttgcttgcttgctgaagttaatatgccagtttgcagtagatccatccgatttggatttagcttatcatgatgtctttgcctggtctggtatagcggaaagccataggaaaagaacctggcctggcaaatcaaggaaggctgctggtgatcatgctaagggtcttcatataccacgattaacagaggtatttcttgttcttgtccaaggaaccagtttgattcagcgacttatgtctgttgcttatacgtatgataatctggctcctagagttttaaaagctcagtctgatcacaggtctagacatgaagtttcacattattcaatgtggctcttggtgagttgggctcattgctgttctttagtgaaatctagccttgctgatagcgatcatttacaagattggctaaagaaattgactctccttattcctgagactgcagttcgtcatgaatcatgcagtggtctctataagttatccctgtcagggctggatggaggagactcaatcaatcgttcttttctgctattggctgcctcaacattattgaaatttcttcctgatgctcaagcactcaaacctattaggatagatgattatgaggaagaaccaatattaaaaccaggatgtaaagagtatttttggttgttatgcaaattagttgacaacatacatataaaggacgctagtcagacaacgctcctcgacttagatgccttggcaagacatttggctgactgtattcgaagtagggagatccttgatcatcaggatggtaatgtagaagatgatgggcttacaggactcctaaggcttgcaacaagtgttgttaaacacaaaccaccctttaaattttcaagggaaggacaggaatttttgagagatatcttcaatctcctgtttttgttgccaagtctaaaggaccgacaacagccaaagtgcaaatcacattcttcaagagctgccgcttacgatttgttagtagagatggtaaaggggtctgttgagaactacaggctaatacacaactgggttatggcacaacacatgcagtcccatgcaccttataaatgggattactggcctcatgaagatgtccgtgctgaatgtagatttgttggccttactaaccttggagctacttgttacttagcttctactattcagcaactttatatgatacctgaggcaagacaggctgtcttcactgccaagtattcagaggatatgaagcacaagaccactcttctggagcttcagaaaatgtttacatatttaatggagagtgaatgcaaagcatataatcctagacctttctgtaaaacatacaccatggataagcagcctctgaatactggggaacagaaagatatgacagagttttttactgatctaattaccaaaatcgaagaaatgtctcccgaactgaaaaataccgtcaaaagtttatttggaggtgtaattacaaacaatgttgtatccttggattgtgaacatgttagtcaaactgctgaagagttttatactgtgaggtgccaagtggctgatatgaagaacatttatgaatctcttgatgaagttactataaaagacactttggaaggtgataacatgtatacttgttctcattgtgggaagaaagtacgagctgaaaaaagggcatgttttaagaaattgcctcgcattttgagtttcaatactatgagatacacatttaatatggtcacgatgatgaaagagaaagtgaatacacacttttccttcccattacgtttggacatgacgccctatacagaagattttcttatgggaaagagtgagaggaaagaaggttttaaagaagtcagtgatcattcaaaagactcagagagctatgaatatgacttgataggagtgactgttcacacaggaacggcagatggtggacactattatagctttatcagagatatagtaaatccccatgcttataaaaacaataaatggtatctttttaatgatgctgaggtaaaaccttttgattctgctcaacttgcatctgaatgttttggtggagagatgacgaccaagacctatgattctgttacagataaatttatggacttctcttttgaaaagacacacagtgcatatatgctgttttacaaacgcatggaaccagaggaagaaaatggcagagaatacaaatttgatgtttcgtcagagttactagagtggatttggcatgataacatgcagtttcttcaagacaaaaacatttttgaacatacatattttggatttatgtggcaattgtgtagttgtattcccagtacattaccagatcctaaagctgtgtccttaatgacagcaaagttaagcacttcctttgtcctagagacatttattcattctaaagaaaagcccacgatgcttcagtggattgaactgttgacgaaacagtttaataatagtcaggcagcttgtgagtggtttttagatcgtatggctgatgacgactggtggccaatgcagatactaattaagtgccctaatcaaattgtgagacagatgtttcagcgtttgtgtatccatgtgattcagaggctgagacctgtgcatgctcatctctatttgcagccaggaatggaagatgggtcagatgatatggatacctcagtagaagatattggtggtcgttcatgtgtcactcgctttgtgagaaccctgttattaattatggaacatggtgtaaaacctcacagtaaacatcttacagagtattttgccttcctttacgaatttgcaaaaatgggtgaagaagagagccaatttttgctttcattgcaagctatatctacaatggtacatttttacatgggaacaaaaggacctgaaaatcctcaagttgaagtgttatcagaggaagaaggggaagaagaagaggaggaagaagatatcctctctctggcagaagaaaaatacaggccagctgcccttgaaaagatgatagctttagttgctcttttggttgaacagtctcgatcagaaaggcatttgacattatcacagactgacatggcagcattaacaggaggaaagggatttcccttcttgtttcaacatattcgtgatggcatcaatataagacaaacttgtaatctgattttcagcctgtgtcgatacaataatcgacttgcagaacatattgtatctatgcttttcacatcaatagcaaagttgactcctgaggcagccaatcctttctttaagttgttgactatgctaatggagtttgctggtggacctccaggaatgcctccctttgcatcttatattctgcagaggatatgggaggtgattgaatacaatccttctcagtgtctagattggttggcagtgcagacaccccgaaataaactggcacacagctgggtcttacagaatatggaaaactgggtcgagcggtttcttttggctcacaattatcctagagtgaggacttctgcagcttatcttctggtgtcccttataccaagcaattcattccgtcagatgttccggtcaacaaggtctttgcacatcccaacccgtgaccttccactcagtccagacacaacagtagtcctacatcaggtctacaacgtgctccttggtttgctctcaagagccaaactttatgttgatgctgctgttcatggcactacaaagctagtgccctattttagctttatgacttactgtttaatttccaaaactgagaagctgatgttttccacatatttcatggatttgtggaaccttttccagcctaaactttctgagccagcaatagctacaaatcacaataaacaggctttgctttcattttggtacaatgtctgtgctgactgtccagagaatatccgccttattgttcagaacccagtggtaaccaagaacattgccttcaattacatccttgctgaccatgatgatcaggatgtggtgctttttaaccgtgggatgctgccagcgtactatggcattctgaggctctgctgtgagcagtctcctgcattcacacgacaactggcttctcaccagaacatccagtgggcctttaagaatcttacaccacatgccagccaataccctggagcagtagaagaactgtttaacctgatgcagctgtttatagctcagaggccagatatgagagaagaagaattagaagatattaaacagttcaagaaaacaaccataagttgttacttacgttgcttagatggccgctcctgctggactactttaataagtgccttcagaatactattagaatctgatgaagacagacttcttgttgtatttaatcgaggattgattctaatgacagagtctttcaacactttgcacatgatgtatcacgaagctacagcttgccatgtgactggagatttagtagaacttctgtcaatatttctttcggttttgaagtctacacgcccttatcttcagagaaaagatgtgaaacaagcattaatccagtggcaggagcgaattgaatttgcccataaactgttaactcttcttaattcctatagtcctccagaacttagaaatgcctgtatagatgtcctcaaggaacttgtacttttgagtccccatgattttcttcatactctggttccctttctacaacacaaccattgtacttaccatcacagtaatataccaatgtctcttggaccttatttcccttgtcgagaaaatatcaagctaataggagggaaaagcaatattcggcctccgcgccctgaactcaatatgtgcctcttgcccacaatggtggaaaccagtaagggcaaagatgacgtttatgatcgtatgctgctagactacttcttttcttatcatcagttcatccatctattatgccgagttgcaatcaactgtgaaaaatttactgaaacattagttaagctgagtgtcctagttgcctatgaaggtttgccacttcatcttgcactgttccccaaactttggactgagctatgccagactcagtctgctatgtcaaaaaactgcatcaagcttttgtgtgaagatcctgttttcgcagaatatattaaatgtatcctaatggatgaaagaacttttttaaacaacaacattgtctacacgttcatgacacatttccttctaaaggttcaaagtcaagtgttttctgaagcaaactgtgccaatttgatcagcactcttattacaaacttgataagccagtatcagaacctacagtctgatttctccaaccgagttgaaatttccaaagcaagtgcttctttaaatggggacctgagggcactcgctttgctcctgtcagtacacactcccaaacagttaaacccagctctaattccaactctgcaagagcttttaagcaaatgcaggacttgtctgcaacagagaaactcactccaagagcaagaagccaaagaaagaaaaactaaagatgatgaaggagcaactcccattaaaaggcggcgtgttagcagtgatgaggagcacactgtagacagctgcatcagtgacatgaaaacagaaaccagggaggtcctgaccccaacgagcacttctgacaatgagaccagagactcctcaattattgatccaggaactgagcaagatcttccttcccctgaaaatagttctgttaaagaataccgaatggaagttccatcttcgttttcagaagacatgtcaaatatcaggtcacagcatgcagaagaacagtccaacaatggtagatatgacgattgtaaagaatttaaagacctccactgttccaaggattctaccctagctgaggaagaatctgagttcccttctacttctatctctgcagttctgtctgacttagctgacttgagaagctgtgatggccaagctttgccctcccaggaccctgaggttgctttatctctcagttgtggccattccagaggactctttagtcatatgcagcaacatgacattttagataccctgtgtaggaccattgaatctacaatccatgtcgtcacaaggatatctggcaaaggaaaccaagctgcttcttga

SEQ ID NO: 1138 - DNA, 303 bp, Homo sapiens; identical to SEQ ID NO: 574

SEQ ID NO: 1139 - DNA, 1416 bp, Homo sapiens
atgcccaacagtgagcccgcatctctgctggagctgttcaacagcatcgccacacaaggggagctcgtaaggtccctcaaagcgggaaatgcgtcaaaggatgaaattgattctgcagtaaagatgttggtgtcattaaaaatgagctacaaagctgccgcgggggaggattacaaggctgactgtcctccagggaacccagcacctaccagtaatcatggcccagatgccacagaagctgaagaggattttgtggacccatggacagtacagacaagcagtgcaaaaggcatagactacgataagctcattgttcggtttggaagtagtaaaattgacaaagagctaataaaccgaatagagagagccaccggccaaagaccacaccacttcctgcgcagaggcatcttcttctcacacagagatatgaatcaggttcttgatgcctatgaaaataagaagccattttatctgtacacgggccggggcccctcttctgaagcaatgcatgtaggtcacctcattccatttattttcacaaagtggctccaggatgtatttaacgtgcccttggtcatccagatgacggatgacgagaagtatctgtggaaggacctgaccctggaccaggcctatagctatgctgtggagaatgccaaggacatcatcgcctgtggctttgacatcaacaagactttcatattctctgacctggactacatggggatgagctcaggtttctacaaaaatgtggtgaagattcaaaagcatgttaccttcaaccaagtgaaaggcattttcggcttcactgacagcgactgcattgggaagatcagttttcctgccatccaggctgctccctccttcagcaactcattcccacagatcttccgagacaggacggatatccagtgccttatcccatgtgccattgaccaggatccttactttagaatgacaagggacgtcgcccccaggatcggctatcctaaaccagccctgctgcactccaccttcttcccagccctgcagggcgcccagaccaaaatgagtgccagcgaccccaactcctccatcttcctcaccgacacggccaagcagatcaaaaccaaggtcaataagcatgcgttttctggagggagagacaccatcgaggagcacaggcagtttgggggcaactgtgatgtggacgtgtctttcatgtacctgaccttcttcctcgaggacgacgacaagctcgagcagatcaggaaggattacaccagcggagccatgctcaccggtgagctcaagaaggcactcatagaggttctgcagcccttgatcgcagagcaccaggcccggcgcaaggaggtcacggatgagatagtgaaagagttcatgactccccggaagctgtccttcgactttcagtag

SEQ ID NO: 1140 - DNA, 1509 bp, Homo sapiens
atgagtgggggcccaatgggaggaaggcccgggggccgaggagcaccagcggttcagcagaacataccctccaccctcctccaggaccacgagaaccagcgactctttgagatgcttggacgaaaatgcttgacgctggccactgcagttgttcagctgtacctggcgctgccccctggagctgagcactggaccaaggagcattgtggggctgtgtgcttcgtgaaggataacccccagaagtcctacttcatccgcctttacggccttcaggctggtcggctgctctgggaacaggagctgtactcacagcttgtctactccacccccacccccttcttccacaccttcgctggagatgactgccaagcggggctgaactttgcagacgaggacgaggcccaggccttccgggccctcgtgcaggagaagatacaaaaaaggaatcagaggcaaagtggagacagacgccagctacccccaccaccaacaccagccaatgaagagagaagaggagggctcccacccctgcccctgcatccaggtggagaccaaggaggccctccagtgggtccgctctccctggggctggcgacagtggacatccagaaccctgacatcacgagttcacgataccgtgggctcccagcacctggacctagcccagctgataagaaacgctcagggaagaagaagatcagcaaagctgatattggtgcacccagtggattcaagcatgtcagccacgtggggtgggacccccagaatggatttgacgtgaacaacctcgacccagatctgcggagtctgttctccagggcaggaatcagcgaggcccagctcaccgacgccgagacctctaaacttatctacgacttcattgaggaccagggtgggctggaggctgtgcggcaggagatgaggcgccaggagccacttccgccgcccccaccgccatctcgaggagggaaccagctcccccggccccctattgtggggggtaacaagggtcgttctggtccactgccccctgtacctttggggattgccccacccccaccaacaccccggggacccccacccccaggccgagggggccctccaccaccaccccctccagctactggacgttctggaccactgccccctccaccccctggagctggtgggccacccatgccaccaccaccgccaccaccgccaccgccgcccagctccgggaatggaccagcccctcccccactccctcctgctctggtgcctgccgggggcctggcccctggtgggggtcggggagcgcttttggatcaaatccggcagggaattcagctgaacaagacccctggggccccagagagctcagcgctgcagccaccacctcagagctcagagggactggtgggggccctgatgcacgtgatgcagaagagaagcagagccatccactcctccgacgaaggggaggaccaggctggcgatgaagatgaagatgatgaatgggatgactga

SEQ ID NO: 1141 - DNA, 2082 bp, Homo sapiens
atgattgctcctcttctttgtatcctgtcttataatttcaacacatttgcgatactcaatgtctattctaaattaaccatgttttgtaccacaaactcattgcccatggatctgttgctgaaacaaggaagtcttaaacaagaagtggaatctttctgttatcagattgtgtctgaatcaaatgatcagaaggttggaatattacaaagtgaagataagcagttgcaaccttcagtttctaaaaaatcagaaggtgagctttccagggtcaaatttatatccaattccaacaaaataacatttagtaaaaaaccaaaaagaagaaaatatgatgaaagttatttgtcttttggatttacttacttcggaaatagagatgcacctcatgctcagtgtgtattatgtaagaaaattttatcaaatagctctttagcccctagtaagcttcgaagacatttggaaactaaacatgctgcatataaagacaaagacataagctttttcaagcaacatctcgattcacctgaaaataataaacccccaacacctaaaattgtgaatacagataatgaaagtgctacagaagcatcatacaatgtaagttaccatatagcgctgagtggagaggctcatactattggagaattgcttatcaaaccttgtgcaaaagatgtagtgatgcggatgtttgatgaacaatatagtaaaaaaatagatgcagtacagctatcaaacagtactgttgcacgtcgaattaaggatctagctgctgacattgaagaagagcttgtttgtagactgaaaatttgcgatgggttttcactgcaactagatgaatcagctgatgtttcaggacttgctgtgctgcttgtgtttgttcgttataggtttaataagtctattgaggaagacctactcctgtgtgaatctttgcaaagtaatgctaccggtgaagaaatattcaactgtatcaacagttttatgcagaaacatgaaattgaatgggaaaaatgtgttgatgtttgtagtgatgcttctagggcagtggatgggaaaattgccgaagctgtcaccttaataaaatatgtggctcccgaaagcaccagtagtcactgcctattatacagacatgcactggcagttaaaataatgcctacatctctaaaaaatgtgctagaccaggcagtacaaatcatcaattatattaaagctcgaccacatcaatccagactattaaaaattttatgtgaggaaatgggtgctcagcacacagcacttcttctaaatacagaggtgaggtggctttctcgaggtaaagttcttgtaagactttttgaacttcgtcgtgaacttttggttttcatggattctgcttttcgactatctgattgtttaacaaattcatcttggctgctaagacttgcatatcttgcagatatttttactaaattaaatgaagttaatttgtcaatgcaaggaaaaaatgtgaccgtttttacagtatttgataaaatgtcgtcattgttaagaaaattggaattttgggcctcatctgtagaagaagaaaactttgattgttttcctacactcagtgattttttgactgaaattaattctacagttgataaagatatttgcagtgccattgtgcagcacctaaggggtttgcgcgctactctgttaaaatactttcctgtaacaaatgacaataatgcttgggttagaaatccatttacagttactgttaaaccagcttcattagtagcacgggactatgagagcctgattgatttaacatctgattctcaagtgaagcaaaattttagtgaactttcactaaatgatttttggagtagcctaattcaggaatacccaagcattgcaaggcgtgcagtgcgtgtacttcttccttttgctacaatgcacctgtgtgaaacggggttttcatattacgctgcaacaaaaacaaaatataggaaaagacttgatgctgcacctcatatgcgaatccgacttagcaatattacacctaatattaagcggatatgtgataaaaagacacaaaaacactgttctcattaa

SEQ ID NO: 1142 - DNA, 1809 bp, Homo sapiens
atggcacgtttaacaaaaagacgacaggcggatacaaaagctatccagcatctttgggcagccattgagattatacggaaccagaagcagattgccaacattgaccgtattacaaagtatatgtctcgagtccacggtatgcaccctaaagagaccacccgtcagctgagcttagctgtgaaagatggtcttattgtcgaaactctaacagtgggctgcaaaggttcaaaagctggtattgaacaagaaggatattggttgccaggagatgagattgactgggaaacagaaaatcatgactggtattgttttgaatgccatttgcctggagaggtgttgatatgtgacctgtgttttcgtgtgtatcattccaagtgtttgtctgatgagttcaggcttagagacagcagtagtccctggcagtgcccagtttgcaggagcattaagaagaagaatacaaacaaacaggagatgggcacatacctcagattcattgtctcccgcatgaaggagagggctatagatcttaataaaaaggggaaggacaataaacacccgatgtacaggaggctggtgcactcagctgtggacgttcccaccattcaagagaaagtgaatgaagggaaataccgaagttatgaagagttcaaagctgatgcccaattgcttctccacaataccgtgattttctatggagcagacagtgagcaagctgacattgcgaggatgctatataaagacacatgtcatgagctggatgaactgcagctttgcaagaattgcttttacttgtcaaatgctcgtcctgacaactggttctgttatccttgtatacctaatcatgagctggtttgggctaaaatgaaaggttttgggttttggccagccaaagtcatgcagaaagaagacaatcaagtcgacgttcgcttctttggccaccaccaccagagggcctggattccttctgaaaacattcaagatatcacagtcaacattcatcggctgcacgtgaagcgcagtatgggttggaaaaaggcctgtgatgagctggagctgcatcagcgtttcctacgagaagggagattttggaaatctaagaatgaggaccgaggtgaggaagaggcagaatccagtatctcctccaccagtaatgagcagctaaaggtcactcaagaaccaagagcaaagaaaggacgacgtaatcaaagtgtggagcccaaaaaggaagaaccagagcctgaaacagaagcagtaagttctagccaggaaatacccacgatgcctcagcccatcgaaaaagtctccgtgtcaactcagacaaagaagttaagtgcctcttcaccaagaatgctgcatcggagcacccagaccacaaacgacggcgtgtgtcagagcatgtgccatgacaaatacaccaagatcttcaatgacttcaaagaccggatgaagtcggaccacaagcgggagacagagcgtgttgtccgagaagctctggagaagctgcgttctgaaatggaagaagaaaagagacaagctgtaaataaagctgtagccaacatgcagggtgagatggacagaaaatgtaagcaagtaaaggaaaagtgtaaggaagaatttgtagaagaaatcaagaagctggcaacacagcacaagcaactgatttctcagaccaagaagaagcagtggtgctacaactgtgaggaggaggccatgtaccactgctgctggaacacatcctactgctccatcaagtgccagcaggagcactggcacgcggagcacaagcgcacctgccgccggaaaagatga

SEQ ID NO: 1143 - DNA, 1650 bp, Homo sapiens
atgctggagaactacaagaatttggccacagtaggatatcagctcttcaaacccagtctgatctcttggctggaacaagaagagtctaggacagtgcagagaggtgatttccaagcttcagaatggaaagtgcaacttaaaaccaaagagttagcccttcagcaggatgttttgggggagccaacctccagtgggattcaaatgataggaagccacaacggaggggaggtcagtgatgttaagcaatgtggagatgtctccagtgaacactcatgccttaagacacatgtgagaactcaaaatagtgagaacacatttgagtgttatctgtatggagtagacttccttactctgcacaagaaaacctctactggagagcaacgttctgtatttagtcagtgtggaaaagccttcagcctgaacccagatgttgtttgccagagaacgtgcacaggagagaaagcttttgattgcagtgactctgggaaatccttcattaatcattcacaccttcagggacatttaagaactcacaatggagaaagtctccatgaatggaaggaatgtgggagaggctttattcactccacagaccttgctgtgcgtatacaaactcacaggtcagaaaaaccctacaaatgtaaggaatgtggaaaaggatttagatattctgcataccttaatattcacatgggaacccacactggagacaatccctatgagtgtaaggagtgtgggaaagccttcaccaggtcttgtcaacttactcagcacagaaaaactcacactggagagaaaccttataaatgtaaggattgtgggagagccttcactgtttcctcttgcttaagtcaacatatgaaaatccatgtgggtgagaagccttatgaatgcaaggaatgtgggatagccttcactagatcttctcaacttactgaacatttaaaaactcacactgcaaaggatccctttgaatgtaagatatgtggaaaatcctttagaaattcctcatgcctcagtgatcactttcgaattcacactggaataaaaccctataaatgtaaggattgtgggaaagccttcactcagaactcagaccttactaagcatgcacgaactcacagtggagagaggccctatgaatgtaaggaatgtggaaaggcctttgccagatcctctcgccttagtgaacatacaagaactcacactggagagaagccttttgaatgtgtcaaatgtgggaaagcctttgctatttcttcaaatcttagtggacatttgagaattcacactggagagaagccctttgagtgcctggaatgtggtaaagcatttacgcattcctccagtcttaataatcacatgcggacccacagcgccaaaaaaccattcacgtgtatggaatgtggcaaagcttttaagtttcccacgtgtgttaaccttcacatgcggatccacactggagaaaaaccctacaaatgtaaacagtgtgggaaatccttcagttactccaattcgtttcagttacatgaacgaactcacactggagagaaaccctatgaatgtaaggagtgcgggaaagccttcagttcttccagttcctttcgaaatcatgaaagaaggcatgcggatgagagactgtcagcataa

SEQ ID NO: 1144 - protein, 670 aa, Homo sapiens
MAKRIKAKPTSDKPGSPYRSVTHFDSLAVIDIPGADTLDKLFDHAVSKFGKKDSLGTREILSEENEMQPNGKVFKKLILGNYKWMNYLEVNRRVNNFGSGLTALGLKPKNTIAIFCETRAEWMIAAQTCFKYNFPLVTLYATLGKEAVVHGLNESEASYLITSVELLESKLKTALLDISCVKHIIYVDNKAINKAEYPEGFEIHSMQSVEELGSNPENLGIPPSRPTPSDMAIVMYTSGSTGRPKGVMMHHSNLIAGMTGQCERIPGLGPKDTYIGYLPLAHVLELTAEISCFTYGCRIGYSSPLTLSDQSSKIKKGSKGDCTVLKPTLMAAVPEIMDRIYKNVMSKVQEMNYIQKTLFKIGYDYKLEQIKKGYDAPLCNLLLFKKVKALLGGNVRMMLSGGAPLSPQTHRFMNVCFCCPIGQGYGLTESCGAGTVTEVTDYTTGRVGAPLICCEIKLKDWQEGGYTINDKPNPRGEIVIGGQNISMGYFKNEEKTAEDYSVDENGQRWFCTGDIGEFHPDGCLQIIDRKKDLVKLQAGEYVSLGKVEAALKNCPLIDNICAFAKSDQSYVISFVVPNQKRLTLLAQQKGVEGTWVDICNNPAMEAEILKEIREAANAMKLERFEIPIKVRLSPEPWTPETGLVTDAFKLKRKELRNHYLKDIERMYGGK

SEQ ID NO: 1145 - protein, 345 aa, Homo sapiens
MTSVRENILFGMGNPLLDISAVVDKDFLDKYSLKPNDQILAEDKHKELFDELVKKFKVEYHAGGSTQNSIKVAQWMIQQPHKAATFFGCIGIDKFGEILKRKAAEAHVDAHYYEQNEQPTGTCAACITGDNRSLIANLAAANCYKKEKHLDLEKNWMLVEKARVCYIAGFFLTVSPESVLKVAHHASENNRIFTLNLSAPFISQFYKESLMKVMPYVDILFGNETEAATFAREQGFETKDIKEIAKKTQALPKMNSKRQRIVIFTQGRDDTIMATESEVTAFAVLDQDQKEIIDTNGAGDAFVGGFLSQLVSDKPLTECIRAGHYAASIIIRRTGCTFPEKPDFH

SEQ ID NO: 1146 - protein, 484 aa, Homo sapiens
MAAGGDHGSPDSYRSPLASRYASPEMCFVFSDRYKFRTWRQLWLWLAEAEQTLGLPITDEQIQEMKSNLENIDFKMAAEEEKRLRHDVMAHVHTFGHCCPKAAGIIHLGATSCYVGDNTDLIILRNALDLLLPKLARVISRLADFAKERASLPTLGFTHFQPAQLTTVGKRCCLWIQDLCMDLQNLKRVRDDLRFRGVKGTTGTQASFLQLFEGDDHKVEQLDKMVTEKAGFKRAFIITGQTYTRKVDIEVLSVLASLGASVHKICTDIRLLANLKEMEEPFEKQQIGSSAMPYKRNPMRSERCCSLARHLMTLVMDPLQTASVQWFERTLDDSANRRICLAEAFLTADTILNTLQNISEGLVVYPKVIERRIRQELPFMATENIIMAMVKAGGSRQDCHEKIRVLSQQAASVVKQEGGDNDLIERIQVDAYFSPIHSQLDHLLDPSSFTGRASQQVQRFLEEEVYPLLKPYESVMKVKAELCL

SEQ ID NO: 1147 - protein, 2275 aa, Homo sapiens
MAAERRCGSMRDLRAQVTSGLLPFPEVTLQALGEDEITLESVLRGKFAAGKNGLACLACGPQLEVVNSITGERLSAYRFSGVNEQPPVVLAVKEFSWQKRTGLLIGLEETEGSVLCLYDLGISKVVKAVVLPGRVTAIEPIINHGGASASTQHLHPSLRWLFGVAAVVTDVGQILLVDLCLDDLSCNQNEVEASDLEVLTGIPAEVPHIRESVMRQGRHLCFQLVSPTGTAVSTLSYISRTNQLAVGFSDGYLALWNMKSMKREYYIQLESGQVPVYAVTFQEPENDPRNCCYLWAVQSTQDSEGDVLSLHLLQLAFGNRKCLASGQILYEGLEYCEERYTLDLTGGMFPLRGQTSNTKLLGCQSIEKFRSHGDREEGVNEALSPDTSVSVFTWQVNIYGQGKPSVYLGLFDINRWYHAQMPDSLRSGEYLHNCSYFALWSLESVVSRTSPHGILDILVHERSLNRGVPPSYPPPEQFFNPSTYNFDATCLLNSGVVHLTCTGFQKETLTFLKKSGPSLNELIPDGYNRCLVAGLLSPRFVDVQPSSLSQEEQLEAILSAAIQTSSLGLLTGYIRRWITEEQPNSATNLRFVLEWTWNKVVLTKEEFDRLCVPLFDGSCHFMDPQTIQSIQQCYLLLSNLNIVLSCFASEAREITERGLIDLSNKFVVSHLICQYAQVVLWFSHSGLLPEGIDDSVQLSRLCYNYPVIQNYYTSRRQKFERLSRGKWNPDCLMIDGLVSQLGERIEKLWKRDEGGTGKYPPASLHAVLDMYLLDGVTEAAKHSITIYLLLDIMYSFPNKTDTPIESFPTVFAISWGQVKLIQGFWLIDHNDYESGLDLLFHPATAKPLSWQHSKIIQAFMSQGEHRQALRYIQTMKPTVSSGNDVILHLTVLLFNRCMVEAWNFLRQHCNRLNIEELLKHMYEVCQEMGLMEDLLKLPFTDTEQECLVKFLQSSASVQNHEFLLVHHLQRANYVPALKLNQTLKINVMNDRDPRLRERSLARNSILDQYGKILPRVHRKLAIERAKPYHLSTSSVFRLVSRPKPLSAVPKQVVTGTVLTRSVFINNVLSKIGEVWASKEPINSTTPFNSSKIEEPSPIVYSLPAPELPEAFFGTPISKASQKISRLLDLVVQPVPRPSQCSEFIQQSSMKSPLYLVSRSLPSSSQLKGSPQAISRASELHLLETPLVVKKAKSLAMSVTTSGFSEFTPQSILRSTLRSTPLASPSPSPGRSPQRLKETRISFVEEDVHPKWIPGAADDSKLEVFTTPKKCAVPVETEWLKSKDRTTSFFLNSPEKEHQEMDEGSQSLEKLDVSKGNSSVSITSDETTLEYQDAPSPEDLEETVFTASKPKSSSTALTTNVTEQTEKDGDKDVFASEVTPSDLQKQMGNLEDAETKDLLVAAEAFSELNHLSPVQGTEASLCAPSVYEGKIFTQKSKVPVLDEGLTSVETYTPAIRANDNKSMADVLGDGGNSSLTISEGPIVSERRLNQEVALNLKEDHEVEVGVLKESVDLPEEKLPISDSPPDTQEIHVIEQEKLEAQDSGEEARNLSFNELYPSGTLKLQYNFDTIDQQFCDLADNKDTAECDIAEVDGELFVAQSNFTLILEGEEGEVEPGDFASSDVLPKAANTATEEKLVCSGENDNHGQIANLPSAVTSDQKSQKVDTLPYVPEPIKVAIAENLLDVIKDTRSKEITSDTMEQSIHETIPLVSQNIMCPTKLVKSAFKTAQETSTMTMNVSQVDDVVSSKTRTRGQRIQNVNVKSAQQEASADVATPKMPGQSVRKKTRKAKEISEASENIYSDVRGLSQNQQIPQNSVTPRRGRRKKEVNQDILENTSSVEQELQITTGRESKRLKSSQLLEPAVEETTKKEVKVSSVTKRTPRRIKRSVENQESVEIINDLKVSTVTSPSRMIRKLRSTNLDASENTGNKQDDKSSDKQLRIKHVRRVRGREVSPSDVREDSNLESSQLTVQAEFDMSAIPRKRGRPRKINPSEDVGSKAVKEERSPKKKEAPSIRRRSTRNTPAKSENVDVGKPALGKSILVPNEELSMVMSSKKKLTKKTESQSQKRSLHSVSEERTDEMTHKETNEQEERLLATASFTKSSRSSRTRSSKAILLPDLSEPNNEPLFSPASEVPRKAKAKKIEVPAQLKELVSDLSSQFVISPPALRSRQKNTSNKNKLEDELKDDAQSVETLGKPKAKRIRTSKTKQASKNTEKESAWSPPPIEIRLISPLASPADGVKSKPRKTTEVTGTGLGRNRKKLSSYPKQILRRKML

SEQ ID NO: 1148 - protein, 318 aa, Homo sapiens
MPKRGKKGAVAEDGDELRTEPEAKKSKTAAKKNDKEAAGEGPALYEDPPDQKTSPSGKPATLKICSWNVDGLRAWIKKKGLDWVKEEAPDILCLQETKCSENKLPAELQELPGLSHQYWSAPSDKEGYSGVGLLSRQCPLKVSYGIGDEEHDQEGRVIVAEFDSFVLVTAYVPNAGRGLVRLEYRQRWDEAFRKFLKGLASRKPLVLCGDLNVAHEEIDLRNPKGNKKNAGFTPQERQGFGELLQAVPLADSFRHLYPNTPYAYTFWTYMMNARSKNVGWRLDYFLLSHSLLPALCDSKIRSKALGSDHCPITLYLAL

SEQ ID NO: 1149 - protein, 803 aa, Homo sapiens
MKKQFNRMKQLANQTVGRAEKTEVLSEDLLQIERRLDTVRSICHHSHKRLVACFQGQHGTDAERRHKKLPLTALAQNMQEASTQLEDSLLGKMLETCGDAENQLALELSQHEVFVEKEIVDPLYGIAEVEIPNIQKQRKQLARLVLDWDSVRARWNQAHKSSGTNFQGLPSKIDTLKEEMDEAGNKVEQCKDQLAADMYNFMAKEGEYGKFFVTLLEAQADYHRKALAVLEKTLPEMRAHQDKWAEKPAFGTPLEEHLKRSGREIALPIEACVMLLLETGMKEEGLFRIGAGASKLKKLKAALDCSTSHLDEFYSDPHAVAGALKSYLRELPEPLMTFNLYEEWTQVASVQDQDKKLQDLWRTCQKLPPQNFVNFRYLIKFLAKLAQTSDVNKMTPSNIAIVLGPNLLWARNEGTLAEMAAATSVHVVAVIEPIIQHADWFFPEEVEFNVSEAFVPLTTPSSNHSFHTGNDSDSGTLERKRPASMAVMEGDLVKKESPPKPKDPVSAAVPAPGRNNSQIASGQNQPQAAAGSHQLSMGQPHNAAGPSPHTLRRAVKKPAPAPPKPGNPPPGHPGGQSSSGTSQHPPSLSPKPPTRSPSPPTQHTGQPPGQPSAPSQLSAPRRYSSSLSPIQAPNHPPPQPPTQATPLMHTKPNSQGPPNPMALPSEHGLEQPSHTPPQTPTPPSTPPLGKQNPSLPAPQTLAGGNPETAQPHAGTLPRPRPVPKPRNRPSVPPPPQPPGVHSAGDSSLTNTAPTASKIVTDSNSRVSEPHRSIFPEMHSDSASKDVPGRILLDIDNDTESTAL

SEQ ID NO: 1150 - protein, 2285 aa, Homo sapiens
MAAQVAPAAASSLGNPPPPPPSELKKAEQQQREEAGGEAAAAAAAERGEMKAAAGQESEGPAVGPPQPLGKELQDGAESNGGGGGGGAGSGGGPGAEPDLKNSNGNAGPRPALNNNLTEPPGGGGGGSSDGVGAPPHSAAAALPPPAYGFGQPYGRSPSAVAAAAAAVFHQQHGGQQSPGLAALQSGGGGGLEPYAGPQQNSHDHGFPNHQYNSYYPNRSAYPPPAPAYALSSPRGGTPGSGAAAAAGSKPPPSSSASASSSSSSFAQQRFGAMGGGGPSAAGGGTPQPTATPTLNQLLTSPSSARGYQGYPGGDYSGGPQDGGAGKGPADMASQCWGAAAAAAAAAAASGGAQQRSHHAPMSPGSSGGGGQPLARTPQPSSPMDQMGKMRPQPYGGTNPYSQQQGPPSGPQQGHGYPGQPYGSQTPQRYPMTMQGRAQSAMGGLSYTQQIPPYGQQGPSGYGQQGQTPYYNQQSPHPQQQQPPYSQQPPSQTPHAQPSYQQQPQSQPPQLQSSQPPYSQQPSQPPHQQSPAPYPSQQSTTQQHPQSQPPYSQPQAQSPYQQQQPQQPAPSTLSQQAAYPQPQSQQSQQTAYSQQRFPPPQELSQDSFGSQASSAPSMTSSKGGQEDMNLSLQSRPSSLPDLSGSIDDLPMGTEGALSPGVSTSGISSSQGEQSNPAQSPFSPHTSPHLPGIRGPSPSPVGSPASVAQSRSGPLSPAAVPGNQMPPRPPSGQSDSIMHPSMNQSSIAQDRGYMQRNPQMPQYSSPQPGSALSPRQPSGGQIHTGMGSYQQNSMGSYGPQGGQYGPQGGYPRQPNYNALPNANYPSAGMAGGINPMGAGGQMHGQPGIPPYGTLPPGRMSHASMGNRPYGPNMANMPPQVGSGMCPPPGGMNRKTQETAVAMHVAANSIQNRPPGYPNMNQGGMMGTGPPYGQGINSMAGMINPQGPPYSMGGTMANNSAGMAASPEMMGLGDVKLTPATKMNNKADGTPKTESKSKKSSSSTTTNEKITKLYELGGEPERKMWVDRYLAFTEEKAMGMTNLPAVGRKPLDLYRLYVSVKEIGGLTQVNKNKKWRELATNLNVGTSSSAASSLKKQYIQCLYAFECKIERGEDPPPDIFAAADSKKSQPKIQPPSPAGSGSMQGPQTPQSTSSSMAEGGDLKPPTPASTPHSQIPPLPGMSRSNSVGIQDAFNDGSDSTFQKRNSMTPNPGYQPSMNTSDMMGRMSYEPNKDPYGSMRKAPGSDPFMSSGQGPNGGMGDPYSRAAGPGLGNVAMGPRQHYPYGGPYDRVRTEPGIGPEGNMSTGAPQPNLMPSNPDSGMYSPSRYPPQQQQQQQQRHDSYGNQFSTQGTPSGSPFPSQQTTMYQQQQQNYKRPMDGTYGPPAKRHEGEMYSVPYSTGQGQPQQQQLPPAQPQPASQQQAAQPSPQQDVYNQYGNAYPATATAATERRPAGGPQNQFPFQFGRDRVSAPPGTNAQQNMPPQMMGGPIQASAEVAQQGTMWQGRNDMTYNYANRQSTGSAPQGPAYHGVNRTDEMLHTDQRANHEGSWPSHGTRQPPYGPSAPVPPMTRPPPSNYQPPPSMQNHIPQVSSPAPLPRPMENRTSPSKSPFLHSGMKMQKAGPPVPASHIAPAPVQPPMIRRDITFPPGSVEATQPVLKQRRRLTMKDIGTPEAWRVMMSLKSGLLAESTWALDTINILLYDDNSIMTFNLSQLPGLLELLVEYFRRCLIEIFGILKEYEVGDPGQRTLLDPGRFSKVSSPAPMEGGEEEEELLGPKLEEEEEEEVVENDEEIAFSGKDKPASENSEEKLISKFDKLPVKIVQKNDPFVVDCSDKLGRVQEFDSGLLHWRIGGGDTTEHIQTHFESKTELLPSRPHAPCPPAPRKHVTTAEGTPGTTDQEGPPPDGPPEKRITATMDDMLSTRSSTLTEDGAKSSEAIKESSKFPFGISPAQSHRNIKILEDEPHSKDETPLCTLLDWQDSLAKRCVCVSNTIRSLSFVPGNDFEMSKHPGLLLILGKLILLHHKHPERKQAPLTYEKEEEQDQGVSCNKVEWWWDCLEMLRENTLVTLANISGQLDLSPYPESICLPVLDGLLHWAVCPSAEAQDPFSTLGPNAVLSPQRLVLETLSKLSIQDNNVDLILATPPFSRLEKLYSTMVRFLSDRKNPVCREMAVVLLANLAQGDSLAARAIAVQKGSIGNLLGFLEDSLAATQFQQSQASLLHMQNPPFEPTSVDMMRRAARALLALAKVDENHSEFTLYESRLLDISVSPLMNSLVSQVICDVLFLIGQS

SEQ ID NO: 1151 - protein, 493 aa, Homo sapiens
MSVDMNSQGSDSNEEDYDPNCEEEEEEEEDDPGDIEDYYVGVASDVEQQGADAFDPEEYQFTCLTYKESEGALNEHMTSLASVLKVSHSVAKLILVNFHWQVSEILDRYKSNSAQLLVEARVQPNPSKHVPTSHPPHHCAVCMQFVRKENLLSLACQHQFCRSCWEQHCSVLVKDGVGVGVSCMAQDCPLRTPEDFVFPLLPNEELREKYRRYLFRDYVESHYQLQLCPGADCPMVIRVQEPRARRVQCNRCNEVFCFKCRQMYHAPTDCATIRKWLTKCADDSETANYISAHTKDCPKCNICIEKNGGCNHMQCSKCKHDFCWMCLGDWKTHGSEYYECSRYKENPDIVNQSQQAQAREALKKYLFYFERWENHNKSLQLEAQTYQRIHEKIQERVMNNLGTWIDWQYLQNAAKLLAKCRYTLQYTYPYAYYMESGPRKKLFEYQQAQLEAEIENLSWKVERADSYDRGDLENQMHIAEQRRRTLLKDFHDT

SEQ ID NO: 1152 - protein, 1435 aa, Homo sapiens
MREKGRRKKGRTWAEAAKTVLEKYPNTPMSHKEILQVIQREGLKEIRSGTSPLACLNAMLHTNSRGEEGIFYKVPGRMGVYTLKKDVPDGVKELSEGSEESSDGQSDSQSSENSSSSSDGGSNKEGKKSRWKRKVSSSSPQSGCPSPTIPAGKVISPSQKHSKKALKQALKQQQQKKQQQQCRPSISISSNQHLSLKTVKAASDSVPAKPATWEGKQSDGQTGSPQNSNSSFSSSVKVENTLLGLGKKSFQRSERLHTRQMKRTKCADIDVETPDSILVNTNLRALINKHTFSVLPGDCQQRLLLLLPEVDRQVGPDGLMKLNGSALNNEFFTSAAQGWKERLSEGEFTPEMQVRIRQEIEKEKKVEPWKEQFFESYYGQSSGLSLEDSKKLTASPSDPKVKKTPAEQPKSMPVSEASLIRIVPVVSQSECKEEALQMSSPGRKEECESQGEVQPNFSTSSEPLLSSALNTHELSSILPIKCPKDEDLLEQKPVTSAEQESEKNHLTTASNYNKSESQESLVTSPSKPKSPGVEKPIVKPTAGAGPQETNMKEPLATLVDQSPESLKRKSSLTQEEAPVSWEKRPRVTENRQHQQPFQVSPQPFLNRGDRIQVRKVPPLKIPVSRISPMPFHPSQVSPRARFPVSITSPNRTGARTLADIKAKAQLVKAQRAAAAAAAAAAAAASVGGTIPGPGPGGGQGPGEGGEGQTARGGSPGSDRVSETGKGPTLELAGTGSRGGTRELLPCGPETQPQSETKTTPSQAQPHSVSGAQLQQTPPVPPTPAVSGACTSVPSPAHIEKLDNEKLNPTRATATVASVSHPQGPSSCRQEKAPSPTGPALISGASPVHCAADGTVELKAGPSKNIPNPSASSKTDASVPVAVTPSPLTSLLTTATLEKLPVPQVSATTAPAGSAPPSSTLPAASSLKTPGTSLNMNGPTLRPTSSIPANNPLVTQLLQGKDVPMEQILPKPLTKVEMKTVPLTAKEERGMGALIATNTTENSTREEVNERQSHPATQQQLGKTLQSKQLPQVPRPLQLFSAKELRDSSIDTHQYHEGLSKATQDQILQTLIQRVRRQNLLSVVPPSQFNFAHSGFQLEDISTSQRFMLGFAGRRTSKPAMAGHYLLNISTYGRGSESFRRTHSVNPEDRFCLSSPTEALKMGYTDCKNATGESSSSKEDDTDEESTGDEQESVTVKEEPQVSQSAGKGDTSSGPHSRETLSTSDCLASKNVKAEIPLNEQTTLSKENYLFTRGQTFDEKTLARDLIQAAQKQMAHAVRGKAIRSSPELFSSTVLPLPADSPTHQPLLLPPLQTPKLYGSPTQIGPSYRGMINVSTSSDMDHNSAVPGSQVSSNVGDVMSFSVTVTTIPASQAMNPSSHGQTIPVQAFSEENSIEGTPSKCYCRLKAMIMCKGCGAFCHDDCIGPSKLCVSCLVVR

SEQ ID NO: 1153 - protein, 68 aa, Homo sapiens
MPKHEFSVDMTCGGCAEAVSRVLNKLGGVKYDIDLPNKKVCIESEHSMDTLLATLKKTGKTVSYLGLE

SEQ ID NO: 1154 - protein, 997 aa, Homo sapiens
MENAHTKTVEEVLGHFGVNESTGLSLEQVKKLKERWGSNELPAEEGKTLLELVIEQFEDLLVRILLLAACISFVLAWFEEGEETITAFVEPFVILLILVANAIVGVWQERNAENAIEALKEYEPEMGKVYRQDRKSVQRIKAKDIVPGDIVEIAVGDKVPADIRLTSIKSTTLRVDQSILTGESVSVIKHTDPVPDPRAVNQDKKNMLFSGTNIAAGKAMGVVVATGVNTEIGKIRDEMVATEQERTPLQQKLDEFGEQLSKVISLICIAVWIINIGHFNDPVHGGSWIRGAIYYFKIAVALAVAAIPEGLPAVITTCLALGTRRMAKKNAIVRSLPSVETLGCTSVICSDKTGTLTTNQMSVCRMFILDRVEGDTCSLNEFTITGSTYAPIGEVHKDDKPVNCHQYDGLVELATICALCNDSALDYNEAKGVYEKVGEATETALTCLVEKMNVFDTELKGLSKIERANACNSVIKQLMKKEFTLEFSRDRKSMSVYCTPNKPSRTSMSKMFVKGAPEGVIDRCTHIRVGSTKVPMTSGVKQKIMSVIREWGSGSDTLRCLALATHDNPLRREEMHLEDSANFIKYETNLTFVGCVGMLDPPRIEVASSVKLCRQAGIRVIMITGDNKGTAVAICRRIGIFGQDEDVTSKAFTGREFDELNPSAQRDACLNARCFARVEPSHKSKIVEFLQSFDEITAMTGDGVNDAPALKKAEIGIAMGSGTAVAKTASEMVLADDNFSTIVAAVEEGRAIYNNMKQFIRYLISSNVGEVVCIFLTAALGFPEALIPVQLLWVNLVTDGLPATALGFNPPDLDIMNKPPRNPKEPLISGWLFFRYLAIGCYVGAATVGAAAWWFIAADGGPRVSFYQLSHFLQCKEDNPDFEGVDCAIFESPYPMTMALSVLVTIEMCNALNSLSENQSLLRMPPWENIWLVGSICLSMSLHFLILYVEPLPLIFQITPLNVTQWLMVLKISLPVILMDETLKFVARNYLEPAILE

SEQ ID NO: 1155 - protein, 511 aa, Homo sapiens; identical to SEQ ID NO: 626

SEQ ID NO: 1156 - protein, 773 aa, Homo sapiens
MSRRKQGKPQHLSKREFSPEPLEAILTDDEPDHGPLGAPEGDHDLLTCGQCQMNFPLGDILIFIEHKRKQCNGSLCLEKAVDKPPSPSPIEMKKASNPVEVGIQVTPEDDDCLSTSSRGICPKQEHIADKLLHWRGLSSPRSAHGALIPTPGMSAEYAPQGICKDEPSSYTCTTCKQPFTSAWFLLQHAQNTHGLRIYLESEHGSPLTPRVGIPSGLGAECPSQPPLHGIHIADNNPFNLLRIPGSVSREASGLAEGRFPPTPPLFSPPPRHHLDPHRIERLGAEEMALATHHPSAFDRVLRLNPMAMEPPAMDFSRRLRELAGNTSSPPLSPGRPSPMQRLLQPFQPGSKPPFLATPPLPPLQSAPPPSQPPVKSKSCEFCGKTFKFQSNLVVHRRSHTGEKPYKCNLCDHACTQASKLKRHMKTHMHKSSPMTVKSDDGLSTASSPEPGTSDLVGSASSALKSVVAKFKSENDPNLIPENGDEEEEEDDEEEEEEEEEEEEELTESERVDYGFGLSLEAARHHENSSRGAVVGVGDESRALPDVMQGMVLSSMQHFSEAFHQVLGEKHKRGHLAEAEGHRDTCDEDSVAGESDRIDDGTVNGRGCSPGESASGGLSKKLLLGSPSSLSPFSKRIKLEKEFDLPPAAMPNTENVYSQWLAGYAASRQLKDPFLSFGDSRQSPFASSSEHSSENGSLRFSTPPGELDGGISGRSGTGSGGSTPHISGPGPGRPSSKEGRRSDTCSSHTPIRRSTQRAQDVWQFSDGSSRALKF

SEQ ID NO: 1157 - protein, 454 aa, Homo sapiens
MPRCPAGAMDEGPVDLRTRPKAAGLPGAALPLRKRPLRAPSPEPAAPRGAAGLVVPLDPLRGGCDLPAVPGPPHGLARPEALYYPGALLPLYPTRAMGSPFPLVNLPTPLYPMMCPMEHPLSADIAMATRADEDGDTPLHIAVVQGNLPAVHRLVNLFQQGGRELDIYNNLRQTPLHLAVITTLPSVVRLLVTAGASPMALDRHGQTAAHLACEHRSPTCLRALLDSAAPGTLDLEARNYDGLTALHVAVNTECQETVQLLLERGADIDAVDIKSGRSPLIHAVENNSLSMVQLLLQHGANVNAQMYSGSSALHSASGRGLLPLVRTLVRSGADSSLKNCHNDTPLMVARSRRVIDILRGKATRPASTSQPDPSPDRSANTSPESSSRLSSNGLLSASPSSSPSQSPPRDPPGFPMAPPNFFLPSPSPPAFLPFAGVLRGPGRPVPPSPAPGGS

SEQ ID NO: 1158 - protein, 706 aa, Homo sapiens
MASPADSCIQFTRHASDVLLNLNRLRSRDILTDVVIVVSREQFRAHKTVLMACSGLFYSIFTDQLKCNLSVINLDPEINPEGFCILLDFMYTSRLNLREGNIMAVMATAMYLQMEHVVDTCRKFIKASEAEMVSAIKPPREEFLNSRMLMPQDIMAYRGREVVENNLPLRSAPGCESRAFAPSLYSGLSTPPASYSMYSHLPVSSLLFSDEEFRDVRMPVANPFPKERALPCDSARPVPGEYSRPTLEVSPNVCHSNIYSPKETIPEEARSDMHYSVAEGLKPAAPSARNAPYFPCDKASKEEERPSSEDEIALHFEPPNAPLNRKGLVSPQSPQKSDCQPNSPTESCSSKNACILQASGSPPAKSPTDPKACNWKKYKFIVLNSLNQNAKPEGPEQAELGRLSPRAYTAPPACQPPMEPENLDLQSPTKLSASGEDSTIPQASRLNNIVNRSMTGSPRSSSESHSPLYMHPPKCTSCGSQSPQHAEMCLHTAGPTFPEEMGETQSEYSDSSCENGAFFCNECDCRFSEEASLKRHTLQTHSDKPYKCDRCQASFRYKGNLASHKTVHTGEKPYRCNICGAQFNRPANLKTHTRIHSGEKPYKCETCGARFVQVAHLRAHVLIHTGEKPYPCEICGTRFRHLQTLKSHLRIHTGEKPYHCEKCNLHFRHKSQLRLHLRQKHGAITNTKVQYRVSATDLPPELPKAC

SEQ ID NO: 1159 - protein, 482 aa, Homo sapiens
MASFSAETNSTDLLSQPWNEPPVILSMVILSLTFLLGLPGNGLVLWVAGLKMQRTVNTIWFLHLTLADLLCCLSLPFSLAHLALQGQWPYGRFLCKLIPSIIVLNMFASVFLLTAISLDRCLVVFKPIWCQNHRNVGMACSICGCIWVVAFVMCIPVFVYREIFTTDNHNRCGYKFGLSSSLDYPDFYGDPLENRSLENIVQPPGEMNDRLDPSSFQTNDHPWTVPTVFQPQTFQRPSADSLPRGSARLTSQNLYSNVFKPADVVSPKIPSGFPIEDHETSPLDNSDAFLSTHLKLFPSASSNSFYESELPQGFQDYYNLGQFTDDDQVPTPLVAITITRLVVGFLLPSVIMIACYSFIVFRMQRGRFAKSQSKTFRVAVVVVAVFLVCWTPYHIFGVLSLLTDPETPLGKTLMSWDHVCIALASANSCFNPFLYALLGKDFRKKARQSIQGILEAAFSEELTRSTHCPSNNVISERNSTTV

SEQ ID NO: 1160 - protein, 495 aa, Homo sapiens; identical to SEQ ID NO: 639

SEQ ID NO: 1161 - protein, 292 aa, Homo sapiens; identical to SEQ ID NO: 644

SEQ ID NO: 1162 - protein, 378 aa, Homo sapiens; identical to SEQ ID NO: 647

SEQ ID NO: 1163 - protein, 61 aa, Homo sapiens
MKRFLFLLLTISLLVMVQIQTGLSGQNDTSQTSSPSASSNISGGIFLFFVANAIIHLFCFS

SEQ ID NO: 1164 - protein, 381 aa, Homo sapiens
MTVARPSVPAALPLLGELPRLLLLVLLCLPAVWGDCGLPPDVPNAQPALEGRTSFPEDTVITYKCEESFVKIPGEKDSVICLKGSQWSDIEEFCNRSCEVPTRLNSASLKQPYITQNYFPVGTVVEYECRPGYRREPSLSPKLTCLQNLKWSTAVEFCKKKSCPNPGEIRNGQIDVPGGILFGATISFSCNTGYKLFGSTSSFCLISGSSVQWSDPLPECREIYCPAPPQIDNGIIQGERDHYGYRQSVTYACNKGFTMIGEHSIYCTVNNDEGEWSGPPPECRGKSLTSKVPPTVQKPTTVNVPTTEVSPTSQKTTTKTTTPNAQATRSTPVSRTTKHFHETTPNKGSGTTSGTTRLLSGHTCFTLTGLLGTLVTMGLLT

SEQ ID NO: 1165 - protein, 238 aa, Homo sapiens
MAVEGGMKCVKFLLYVLLLAFCACAVGLIAVGVGAQLVLSQTIIQGATPGSLLPVVIIAVGVFLFLVAFVGCCGACKENYCLMITFAIFLSLIMLVEVAAAIAGYVFRDKVMSEFNNNFRQQMENYPKNNHTASILDRMQADFKCCGAANYTDWEKIPSMSKNRVPDSCCINVTVGCGINFNEKAIHKEGCVEKIGGWLRKNVLVVAAAALGIAFVEVLGIVFACCLVKSIRSGYEVM

SEQ ID NO: 1166 - protein, 345 aa, Homo sapiens
MQRLVAWDPACLPLPPPPPAFKSMEVANFYYEADCLAAAYGGKAAPAAPPAARPGPRPPAGELGSIGDHERAIDFSPYLEPLGAPQAPAPATATDTFEAAPPAPAPAPASSGQHHDFLSDLFSDDYGGKNCKKPAEYGYVSLGRLGAAKGALHPGCFAPLHPPPPPPPPPAELKAEPGFEPADCKRKEEAGAPGGGAGMAAGFPYALRAYLGYQAVPSGSSGSLSTSSSSSPPGTPSPADAKAPPTACYAGAAPAPSQVKSKAKKTVDKHSDEYKIRRERNNIAVRKSRDKAKMRNLETQHKVLELTAENERLQKKVEQLSRELSTLRNLFKQLPEPLLASSGHC

SEQ ID NO: 1167 - protein, 2537 aa, Homo sapiens
MEDFRGIAEESFPSFLTNSLFGNSGILENVTLSSNLGLPVAVSTLARDRSSTDNRYPDIQASYLVEGRFSVPSGSSPGSQSDAEPRERLQLSFQDDDSISRKKSYVESQRLSNALSKQSALQMETAGPEEEPAGATESLQGQDLFNRASPLEQAQDSPIDFHLQSWMNNKEPKIVVLDAGKHFEDKTLKSDLSHTSLLENEKLILPTSLEDSSDDDIDDEMFYDDHLEAYFEQLAIPGMIYEDLEGPEPPEKGFKLPTNGLRQANENGSLNCKFQSENNSSLISLDSHSSETTHKESEESQVICLPGTSNSIGTGDSRRYTDGMLPFSSGTWGTEKEIENLKGIVPDLNSECASKDVLVKTLRAIDVKLNSDNFHDANANRGGFDLTDPVKQGAECPHQNKTVLHMDGCLDTETPTVSIQENVDVASLKPISDSGINFTDAIWSPTCERRTCECHESIEKNKDKTDLPQSVVYQNEEGRWVTDLAYYTSFNSKQNLNVSLSDEMNEDFRSGSEAFDLIAQDEEEFNKEHQFIQEENIDAHNTSVALGDTSWGATINYSLLRKSRSTSDLDKDDASYLRLSLGEFFAQRSEALGCLGGGNNVKRPSFGYFIRSPEKREPIALIRKSDVSRGNLEKEMAHLNHDLYSGDLNEQSQAQLSEGSITLQVEAVESTSQVDENDVTLTADKGKTEDTFFMSNKPQRYKDKLPDSGDSMLRISTIASAIAEASVNTDPSQLAAMIKALSNKTRDKTFQEDEKQKDYSHVRHFLPNDLEKSNGSNALDMEKYLKKTEVSRYESALENFSRASMSDTWDLSLPKEQTTQDIHPVDLSATSVSVRAPEENTAAIVYVENGESENQESFRTINSSNSVTNRENNSAVVDVKTCSIDNKLQDVGNDEKATSISTPSDSYSSVRNPRITSLCLLKDCEEIRDNRENQRQNECVSEISNSEKHVTFENHRIVSPKNSDLKNTSPEHGGRGSEDEQESFRPSTSPLSHSSPSEISGTSSSGCALESFGSAAQQQQPPCEQELSPLVCSPAGVSRLTYVSEPESSYPTTATDDALEDRKSDITSELSTTIIQGSPAALEERAMEKLREKVPFQNRGKGTLSSIIQNNSDTRKATETTSLSSKPEYVKPDFRWSKDPSSKSGNLLETSEVGWTSNPEELDPIRLALLGKSGLSCQVGSATSHPVSCQEPIDEDQRISPKDKSTAGREFSGQVSHQTTSENQCTPIPSSTVHSSVADMQNMPAAVHALLTQPSLSAAPFAQRYLGTLPSTGSTTLPQCHAGNATVCGFSGGLPYPAVAGEPVQNSVAVGICLGSNIGSGWMGTSSLCNPYSNTLNQNLLSTTKPFPVPSVGTNCGIEPWDSGVTSGLGSVRVPEELKLPHACCVGIASQTLLSVLNPTDRWLQVSIGVLSISVNGEKVDLSTYRCLVFKNKAIIRPHATEEIKVLFIPSSPGVFRCTFSVASWPCSTDAETIVQAEALASTVTLTAIAESPVIEVETEKKDVLDFGDLTYGGWKALPLKLINRTHATVPIRLIINANAVAWRCFTFSKESVRAPVEVAPCADVVTRLAGPSVVNHMMPASYDGQDPEFLMIWVLFHSPKKQISSSDILDSAEEFSAKVDIEVDSPNPTPVLRSVSLRARAGIARIHAPRDLQTMHFLAKVASSRKQHLPLKNAGNIEVYLDIKVPEQGSHFSVDPKNLLLKPGEEHEVIVSFTPKDPEACEERILKIFVQPFGPQYEVVLKGEVISSGSKPLSPGPCLDIPSILSNKQFLAWGGVPLGRTQLQKLALRNNSASTTQHLRLLIRGQDQDCFQLQNTFGSEQRLTSNCEIRIHPKEDIFISVLFAPTRLSCMLARLEIKQLGNRSQPGIKFTIPLSGYGGTSNLILEGVKKLSDSYMVTVNGLVPGKESKIVFSVRNTGSRAAFVKAVGFKDSQKKVLLDPKVLRIFPDKFVLKERTQENVTLIYNPSDRGINNKTATELSTVYLFGGDEISRQQYRRALLHKPEMIKQILPEHSVLQNINFVEAFQDELLVTEVYDLPQRPNDVQLFYGSMCKIILSVIGEFRDCISSREFLQPSSKASLESTSDLGASGKHGGNVSLDVLPVKGPQGSPLLSRAARPPLDQLASEEPWTVLPEHLILVAPSPCDMAKTGRFQIVNNSVRLLRFELCWPAHCLTVTPQHGCVAPESKLQILVSPNSSLSTKQSMFPWSGLIYIHCDDGQKKIVKVQIREDLTQVELLTRLTSKPFGILSPVSEPSVSHLVKPMTKPPSTKVEIRNKSITFPTTEPGETSESCLELENHGTTDVKWHLSSLAPPYVKGVDESGDVFRATYAAFRCSPISGLLESHGIQKVSITFLPRGRGDYAQFWDVECHPLKEPHMKHTLRFQLSGQSIEAENEPENACLSTDSLIKIDHLVKPRRQAVSEASARIPEQLDVTARGVYAPEDVYRFRPTSVGESRTLKVNLRNNSFITHSLKFLSPREPFYVKHSKYSLRAQHYINMPVQFKPKSAGKFEALLVIQTDEGKSIAIRLIGEALGKN

SEQ ID NO: 1168 - protein, 468 aa, Homo sapiens
MAASSNSSLSGSSVSSDAEEYQPPIWKSYLYQLQQEAPRPKRIICPREVENRPKYYGREFHGIISREQADELLGGVEGAYILRESQRQPGCYTLALRFGNQTLNYRLFHDGKHFVGEKRFESIHDLVTDGLITLYIETKAAEYISKMTTNPIYEHIGYATLLREKVSRRLSRSKNEPRKTNVTHEEHTAVEKISSLVRRAALTHNDNHFNYEKTHNFKVHTFRGPHWCEYCANFMWGLIAQGVRCSDCGLNVHKQCSKHVPNDCQPDLKRIKKVYCCDLTTLVKAHNTQRPMVVDICIREIEARGLKSEGLYRVSGFTEHIEDVKMAFDRDGEKADISANVYPDINIITGALKLYFRDLPIPVITYDTYSKFIDAAKISNADERLEAVHEVLMLLPPAHYETLRYLMIHLKKVTMNEKDNFMNAENLGIVFGPTLMRPPEDSTLTTLHDMRYQKLIVQILIENEDVLF

SEQ ID NO: 1169 - protein, 705 aa, Homo sapiens
MTIEDLPDFPLEGNPLFGRYPFIFSASDTPVIFSISAAPMPSDCEFSFFDPNDASCQEILFDPKTSVSELFAILRQWVPQVQQNIDIIGNEILKRGCNVNDRDGLTDMTLLHYTCKSGAHGIGDVETAVKFATQLIDLGADISLRSRWTNMNALHYAAYFDVPELIRVILKTSKPKDVDATCSDFNFGTALHIAAYNLCAGAVKCLLEQGANPAFRNDKGQIPADVVPDPVDMPLEMADAAATAKEIKQMLLDAVPLSCNISKAMLPNYDHVTGKAMLTSLGLKLGDRVVIAGQKVGTLRFCGTTEFASGQWAGIELDEPEGKNNGSVGKVQYFKCAPKYGIFAPLSKISKAKGRRKNITHTPSTKAAVPLIRSQKIDVAHVTSKVNTGLMTSKKDSASESTLSLPPGEELKTVTEKDVALLGSVSSCSSTSSLEHRQSYPKKQNAISSNKKTMSKSPSLSSRASAGLNSSATSTANNSRCEGELRLGERVLVVGQRLGTIRFFGTTNFAPGYWYGIELEKPHGKNDGSVGGVQYFSCSPRYGIFAPPSRVQRVTDSLDTLSEISSNKQNHSYPGFRRSFSTTSASSQKEINRRNAFSKSKAALRRSWSSTPTAGGIEGSVKLHEGSQVLLTSSNEMGTVRYVGPTDFASGIWLGLELRSAKGKNDGSVGDKRYFTCKPNHGVLVRPSRVTYRGINGSKLVDENC

SEQ ID NO: 1170 - protein, 285 aa, Homo sapiens
MPAATVDHSQRICEVWACNLDEEMKKIRQVIRKYNYVAMDTEFPGVVARPIGEFRSNADYQYQLLRCNVDLLKIIQLGLTFMNEQGEYPPGTSTWQFNFKFNLTEDMYAQDSIELLTTSGIQFKKHEEEGIETQYFAELLMTSGVVLCEGVKWLSFHSGYDFGYLIKILTNSNLPEEELDFFEILRLFFPVIYDVKYLMKSCKNLKGGLQEVAEQLELERIGPQHQAGSDSLLTGMAFFKMREMFFEDHIDDAKYCGHLYGLGSGSSYVQNGTGNAYEEEANKQS

SEQ ID NO: 1171 - protein, 415 aa, Homo sapiens
MDFDKKGGKGETEEGRRMSKAGGGRSSHGIRSSGTSSGVLMVGPNFRVGKKIGCGNFGELRLGKNLYTNEYVAIKLEPIKSRAPQLHLEYRFYKQLSATEGVPQVYYFGPCGKYNAMVLELLGPSLEDLFDLCDRTFTLKTVLMIAIQLITRMEYVHTKSLIYRDVKPENFLVGRPGTKRQHAIHIIDFGLAKEYIDPETKKHIPYREHKSLTGTARYMSINTHLGKEQSRRDDLEALGHMFMYFLRGSLPWQGLKADTLKERYQKIGDTKRATPIEVLCENFPEEMATYLRYVRRLDFFEKPDYDYLRKLFTDLFDRSGFVFDYEYDWAGKPLPTPIGTVHTDLPSQPQLRDKTQPHSKNQALNSTNGELNADDPTAGHSNAPITAPAEVEVADETKCCCFFKRRKRKSLQRHK

SEQ ID NO: 1172 - protein, 98 aa, Homo sapiens
MMCGAPSATQPATAETQHIADQVRSQLEEKENKKFPVFKAVSFKSQVVAGTNYFIKVHVGDEDFVHLRVFQSLPHENKPLTLSNYQTNKAKHDELTYF

SEQ ID NO: 1173 - protein, 793 aa, Homo sapiens
MGVWLNKDDYIRDLKRIILCFLIVYMAILVGTDQDFYSLLGVSKTASSREIRQAFKKLALKLHPDKNPNNPNAHGDFLKINRAYEVLKDEDLRKKYDKYGEKGLEDNQGGQYESWNYYRYDFGIYDDDPEIITLERREFDAAVNSGELWFVNFYSPGCSHCHDLAPTWRDFAKEVDGLLRIGAVNCGDDRMLCRMKGVNSYPSLFIFRSGMAPVKYHGDRSKESLVSFAMQHVRSTVTELWTGNFVNSIQTAFAAGIGWLITFCSKGGDCLTSQTRLRLSGMLDGLVNVGWMDCATQDNLCKSLDITTSTTAYFPPGATLNNKEKNSILFLNSLDAKEIYLEVIHNLPDFELLSANTLEDRLAHHRWLLFFHFGKNENSNDPELKKLKTLLKNDHIQVGRFDCSSAPDICSNLYVFQPSLAVFKGQGTKEYEIHHGKKILYDILAFAKESVNSHVTTLGPQNFPANDKEPWLVDFFAPWCPPCRALLPELRRASNLLYGQLKFGTLDCTVHEGLCNMYNIQAYPTTVVFNQSNIHEYEGHHSAEQILEFIEDLMNPSVVSLTPTTFNELVTQRKHNEVWMVDFYSPWCHPCQVLMPEWKRMARTLTGLINVGSIDCQQYHSFCAQENVQRYPEIRFFPPKSNKAYHYHSYNGWNRDAYSLRIWGLGFLPQVSTDLTPQTFSEKVLQGKNHWVIDFYAPWCGPCQNFAPEFELLARMIKGKVKAGKVDCQAYAQTCQKAGIRAYPTVKFYFYERAKRNFQEEQINTRDAKAIAALISEKLETLRNQGKRNKDEL

SEQ ID NO: 1174 - protein, 434 aa, Homo sapiens
MSILKIHAREIFDSRGNPTVEVDLFTSKGLFRAAVPSGASTGIYEALELRDNDKTRYMGKGVSKAVEHINKTIAPALVSKKLNVTEQEKIDKLMIEMDGTENKSKFGANAILGVSLAVCKAGAVEKGVPLYRHIADLAGNSEVILPVPAFNVINGGSHAGNKLAMQEFMILPVGAANFREAMRIGAEVYHNLKNVIKEKYGKDATNVGDEGGFAPNILENKEGLELLKTAIGKAGYTDKVVIGMDVAASEFFRSGKYDLDFKSPDDPSRYISPDQLADLYKSFIKDYPVVSIEDPFDQDDWGAWQKFTASAGIQVVGDDLTVTNPKRIAKAVNEKSCNCLLLKVNQIGSVTESLQACKLAQANGWGVMVSHRSGETEDTFIADLVVGLCTGQIKTGAPCRSERLAKYNQLLRIEEELGSKAKFAGRNFRNPLAK

SEQ ID NO: 1175 - protein, 348 aa, Homo sapiens
MNMTQARVLVAAVVGLVAVLLYASIHKIEEGHLAVYYRGGALLTSPSGPGYHIMLPFITTFRSVQTTLQTDEVKNVPCGTSGGVMIYIDRIEVVNMLAPYAVFDIVRNYTADYDKTLIFNKIHHELNQFCSAHTLQEVYIELFDQIDENLKQALQKDLNLMAPGLTIQAVRVTKPKIPEAIRRNFELMEAEKTKLLIAAQKQKVVEKEAETERKKAVIEAEKIAQVAKIRFQQKVMEKETEKRISEIEDAAFLAREKAKADAEYYAAHKYATSNKHKLTPEYLELKKYQAIASNSKIYFGSNIPNMFVDSSCALKYSDIRTGRESSLPSKEALEPSGENVIQNKESTG

SEQ ID NO: 1176 - protein, 452 aa, Homo sapiens
MSETPAQCSIKQERISYTPPESPVPSYASSTPLHVPVPRALRMEEDSIRLPAHLRLQPIYWSRDDVAQWLKWAENEFSLRPIDSNTFEMNGKALLLLTKEDFRYRSPHSGDVLYELLQHILKQRKPRILFSPFFHPGNSIHTQPEVILHQNHEEDNCVQRTPRPSVDNVHHNPPTIELLHRSRSPITTNHRPSPDPEQRPLRSPLDNMIRRLSPAERAQGPRPHQENNHQESYPLSVSPMENNHCPASSESHPKPSSPRQESTRVIQLMPSPIMHPLILNPRHSVDFKQSRLSEDGLHREGKPINLSHREDLAYMNHIMVSVSPPEEHAMPIGRIADCRLLWDYVYQLLSDSRYENFIRWEDKESKIFRIVDPNGLARLWGNHKNRTNMTYEKMSRALRHYYKLNIIRKEPGQRLLFRFMKTPDEIMSGRTDRLEHLESQELDEQIYQEDEC

SEQ ID NO: 1177 - protein, 860 aa, Homo sapiens
MAPPSTREPRVLSATSATKSDGEMVLPGFPDADSFVKFALGSVVAVTKASGGLPQFGDEYDFYRSFPGFQAFCETQGDRLLQCMSRVMQYHGCRSNIKDRSKVTELEDKFDLLVDANDVILERVGILLDEASGVNKNQQPVLPAGLQVPKTVVSSWNRKAAEYGKKAKSETFRLLHAKNIIRPQLKFREKIDNSNTPFLPKIFIKPNAQKPLPQALSKERRERPQDRPEDLDVPPALADFIHQQRTQQVEQDMFAHPYQYELNHFTPADAVLQKPQPQLYRPIEETPCHFISSLDELVELNEKLLNCQEFAVDLEHHSYRSFLGLTCLMQISTRTEDFIIDTLELRSDMYILNESLTDPAIVKVFHGADSDIEWLQKDFGLYVVNMFDTHQAARLLNLGRHSLDHLLKLYCNVDSNKQYQLADWRIRPLPEEMLSYARDDTHYLLYIYDKMRLEMWERGNGQPVQLQVVWQRSRDICLKKFIKPIFTDESYLELYRKQKKHLNTQQLTAFQLLFAWRDKTARREDESYGYVLPNHMMLKIAEELPKEPQGIIACCNPVPPLVRQQINEMHLLIQQAREMPLLKSEVAAGVKKSGPLPSAERLENVLFGPHDCSHAPPDGYPIIPTSGSVPVQKQASLFPDEKEDNLLGTTCLIATAVITLFNEPSAEDSKKGPLTVAQKKAQNIMESFENPFRMISNRWKLAQVQVQKDSKEAVKKKAAEQTAAREQAKEACKAAAEQAISVRQQVVLENAAKKRERATSDPRTTEQKQEKKRLKISKKPKDPEPPEKEFTPYDYSQSDFKAFAGNSKSKVSSQFDPNKQTPSGKKCIAAKKIKQSVGNKSMSFPTGKSDRGFRYNWPQR

SEQ ID NO: 1178 - protein, 293 aa, Homo sapiens
MAMEMRLPVARKPLSERLGRDTKKHLVVPGDTITTDTGFMRGHGTYMGEEKLIASVAGSVERVNKLICVKALKTRYIGEVGDIVVGRITEVQQKRWKVETNSRLDSVLLLSSMNLPGGELRRRSAEDELAMRGFLQEGDLISAEVQAVFSDGAVSLHTRSLKYGKLGQGVLVQVSPSLVKRQKTHFHDLPCGASVILGNNGFIWIYPTPEHKEEEAGGFIANLEPVSLADREVISRLRNCIISLVTQRMMLYDTSILYCYEASLPHQIKDILKPEIMEEIVMETRQRLLEQEG

SEQ ID NO: 1179 - protein, 439 aa, Homo sapiens
MKETPLSNCERRFLLRAIEEKKRLDGRQTYDYRNIRISFGTDYGCCIVELGKTRVLGQVSCELVSPKLNRATEGILFFNLELSQMAAPAFEPGRQSDLLVKLNRLMERCLRNSKCIDTESLCVVAGEKVWQIRVDLHLLNHDGNIIDAASIAAIVALCHFRRPDVSVQGDEVTLYTPEERDPVPLSIHHMPICVSFAFFQQGTYLLVDPNEREERVMDGLLVIAMNKHREICTIQSSGGIMLLKDQVLRCSKIAGVKVAEITELILKALENDQKVRKEGGKFGFAESIANQRITAFKMEKAPIDTSDVEEKAEEIIAEAEPPSEVVSTPVLWTPGTAQIGEGVENSWGDLEDSEKEDDEGGGDQAIILDGIKMDTGVEVSDIGSQDAPIILSDSEEEEMIILEPDKNPKKIRTQTTSAKQEKAPSKKPVKRRKKKRAAN

SEQ ID NO: 1180 - protein, 321 aa, Homo sapiens
MKPGFSPRGGGFGGRGGFGDRGGRGGRGGFGGGRGRGGGFRGRGRGGGGGGGGGGGGGRGGGGFHSGGNRGRGRGGKRGNQSGKNVMVEPHRHEGVFICRGKEDALVTKNLVPGESVYGEKRVSISEGDDKIEYRAWNPFRSKLAAAILGGVDQIHIKPGAKVLYLGAASGTTVSHVSDIVGPDGLVYAVEFSHRSGRDLINLAKKRTNIIPVIEDARHPHKYRMLIAMVDVIFADVAQPDQTRIVALNAHTFLRNGGHFVISIKANCIDSTASAEAVFASEVKKMQQENMKPQEQLTLEPYERDHAVVVGVYRPPPKVKN

SEQ ID NO: 1181 - protein, 843 aa, Homo sapiens; identical to SEQ ID NO: 693

SEQ ID NO: 1182 - protein, 86 aa, Homo sapiens
MIPAVVLLLLLLVEQAAALGEPQLCYILDAILFLYGIVLTLLYCRLKIQVRKAAITSYEKSDGVYTGLSTRNQETYETLKHEKPPQ

SEQ ID NO: 1183 - protein, 529 aa, Homo sapiens; identical to SEQ ID NO: 697

SEQ ID NO: 1184 - protein, 1269 aa, Homo sapiens
MEATGVLPFVRGVDLSGNDFKGGYFPENVKAMTSLRWLKLNRTGLCYLPEELAALQKLEHLSVSHNNLTTLHGELSSLPSLRAIVARANSLKNSGVPDDIFKLDDLSVLDLSHNQLTECPRELENAKNMLVLNLSHNSIDTIPNQLFINLTDLLYLDLSENRLESLPPQMRRLVHLQTLVLNGNPLLHAQLRQLPAMTALQTLHLRSTQRTQSNLPTSLEGLSNLADVDLSCNDLTRVPECLYTLPSLRRLNLSSNQITELSLCIDQWVHVETLNLSRNQLTSLPSAICKLSKLKKLYLNSNKLDFDGLPSGIGKLTNLEEFMAANNNLELVPESLCRCPKLRKLVLNKNHLVTLPEAIHFLTEIEVLDVRENPNLVMPPKPADRAAEWYNIDFSLQNQLRLAGASPATVAAAAAAGSGPKDPMARKMRLRRRKDSAQDDQAKQVLKGMSDVAQEKNKKQEESADARAPSGKVRRWDQGLEKPRLDYSEFFTEDVGQLPGLTIWQIENFVPVLVEEAFHGKFYEADCYIVLKTFLDDSGSLNWEIYYWIGGEATLDKKACSAIHAVNLRNYLGAECRTVREEMGDESEEFLQVFDNDISYIEGGTASGFYTVEDTHYVTRMYRVYGKKNIKLEPVPLKGTSLDPRFVFLLDRGLDIYVWRGAQATLSSTTKARLFAEKINKNERKGKAEITLLVQGQELPEFWEALGGEPSEIKKHVPEDFWPPQPKLYKVGLGLGYLELPQINYKLSVEHKQRPKVELMPRMRLLQSLLDTRCVYILDCWSDVFIWLGRKSPRLVRAAALKLGQELCGMLHRPRHATVSRSLEGTEAQVFKAKFKNWDDVLTVDYTRNAEAVLQSPGLSGKVKRDAEKKDQMKADLTALFLPRQPPMSLAEAEQLMEEWNEDLDGMEGFVLEGKKFARLPEEEFGHFYTQDCYVFLCRYWVPVEYEEEEKKEDKEEKAEGKEGEEATAEAEEKQPEEDFQCIVYFWQGREASNMGWLTFTFSLQKKFESLFPGKLEVVRMTQQQENPKFLSHFKRKFIIHRGKRKAVQGAQQPSLYQIRTNGSALCTRCIQINTDSSLLNSEFCFILKVPFESEDNQGIVYAWVGRASDPDEAKLAEDILNTMFDTSYSKQVINEGEEPENFFWVGIGAQKPYDDDAEYMKHTRLFRCSNEKGYFAVTEKCSDFCQDDLADDDIMLLDNGQEVYMWVGTQTSQVEIKLSLKACQVYIQHMRSKEHERPRRLRLVRKGNEQHAFTRCFHAWSAFCKALA

SEQ ID NO: 1185 - protein, 427 aa, Homo sapiens
MFFTCGPNEAMVVSGFCRSPPVMVAGGRVFVLPCIQQIQRISLNTLTLNVKSEKVYTRHGVPISVTGIAQVKIQGQNKEMLAAACQMFLGKTEAEIAHIALETLEGHQRAIMAHMTVEEIYKDRQKFSEQVFKVASSDLVNMGISVVSYTLKDIHDDQDYLHSLGKARTAQVQKDARIGEAEAKRDAGIREAKAKQEKVSAQYLSEIEMAKAQRDYELKKAAYDIEVNTRRAQADLAYQLQVAKTKQQIEEQRVQVQVVERAQQVAVQEQEIARREKELEARVRKPAEAERYKLERLAEAEKSQLIMQAEAEAASVRMRGEAEAFAIGARARAEAEQMAKKAEAFQLYQEAAQLDMLLEKLPQVAEEISGPLTSANKITLVSSGSGTMGAAKVTGEVLDILTRLPESVERLTGVSISQVNHKPLRTA

SEQ ID NO: 1186 - protein, 379 aa, Homo sapiens
MAATEGVGEAAQGGEPGQPAQPPPQPHPPPPQQQHKEEMAAEAGEAVASPMDDGFVSLDSPSYVLYRDRAEWADIDPVPQNDGPNPVVQIIYSDKFRDVYDYFRAVLQRDERSERAFKLTRDAIELNAANYTVWHFRRVLLKSLQKDLHEEMNYITAIIEEQPKNYQVWHHRRVLVEWLRDPSQELEFIADILNQDAKNYHAWQHRQWVIQEFKLWDNELQYVDQLLKEDVRNNSVWNQRYFVISNTTGYNDRAVLEREVQYTLEMIKLVPHNESAWNYLKGILQDRGLSKYPNLLNQLLDLQPSHSSPYLIAFLVDIYEDMLENQCDNKEDILNKALELCEILAKEKDTIRKEYWRYIGRSLQSKHSTENDSPTNVQQ

SEQ ID NO: 1187 - protein, 545 aa, Homo sapiens
MGRRGSAPGNGRTLRGCERGGRRRRSADSVMAEQVALSRTQVCGILREELFQGDAFHQSDTHIFIIMGASGDLAKKKIYPTIWWLFRDGLLPENTFIVGYARSRLTVADIRKQSEPFFKATPEEKLKLEDFFARNSYVAGQYDDAASYQRLNSHMNALHLGSQANRLFYLALPPTVYEAVTKNIHESCMSQIGWNRIIVEKPFGRDLQSSDRLSNHISSLFREDQIYRIDHYLGKEMVQNLMVLRFANRIFGPIWNRDNIACVILTFKEPFGTEGRGGYFDEFGIIRDVMQNHLLQMLCLVAMEKPASTNSDDVRDEKVKVLKCISEVQANNVVLGQYVGNPDGEGEATKGYLDDPTVPRGSTTATFAAVVLYVENERWDGVPFILRCGKALNERKAEVRLQFHDVAGDIFHQQCKRNELVIRVQPNEAVYTKMMTKKPGMFFNPEESELDLTYGNRYKNVKLPDAYERLILDVFCGSQMHFVRSDELREAWRIFTPLLHQIELEKPKPIPYIYGSRGPTEADELMKRVGFQYEGTYKWVNPHKL

SEQ ID NO: 1188 - protein, 1203 aa, Homo sapiens
MAACGRVRRMFRLSAALHLLLLFAAGAEKLPGQGVHSQGQGPGANFVSFVGQAGGGGPAGQQLPQLPQSSQLQQQQQQQQQQQQPQPPQPPFPAGGPPARRGGAGAGGGWKLAEEESCREDVTRVCPKHTWSNNLAVLECLQDVREPENEISSDCNHLLWNYKLNLTTDPKFESVAREVCKSTITEIKECADEPVGKGYMVSCLVDHRGNITEYQCHQYITKMTAIIFSDYRLICGFMDDCKNDINILKCGSIRLGEKDAHSQGEVVSCLEKGLVKEAEEREPKIQVSELCKKAILRVAELSSDDFHLDRHLYFACRDDRERFCENTQAGEGRVYKCLFNHKFEESMSEKCREALTTRQKLIAQDYKVSYSLAKSCKSDLKKYRCNVENLPRSREARLSYLLMCLESAVHRGRQVSSECQGEMLDYRRMLMEDFSLSPEIILSCRGEIEHHCSGLHRKGRTLHCLMKVVRGEKGNLGMNCQQALQTLIQETDPGADYRIDRALNEACESVIQTACKHIRSGDPMILSCLMEHLYTEKMVEDCEHRLLELQYFISRDWKLDPVLYRKCQGDASRLCHTHGWNETSEFMPQGAVFSCLYRHAYRTEEQGRRLSRECRAEVQRILHQRAMDVKLDPALQDKCLIDLGKWCSEKTETGQELECLQDHLDDLVVECRDIVGNLTELESEDIQIEALLMRACEPIIQNFCHDVADNQIDSGDLMECLIQNKHQKDMNEKCAIGVTHFQLVQMKDFRFSYKFKMACKEDVLKLCPNIKKKVDVVICLSTTVRNDTLQEAKEHRVSLKCRRQLRVEELEMTEDIRLEPDLYEACKSDIKNFCSAVQYGNAQIIECLKENKKQLSTRCHQKVFKLQETEMMDPELDYTLMRVCKQMIKRFCPEADSKTMLQCLKQNKNSELMDPKCKQMITKRQITQNTDYRLNPMLRKACKADIPKFCHGILTKAKDDSELEGQVISCLKLRYADQRLSSDCEDQIRIIIQESALDYRLDPQLQLHCSDEISSLCAEEAAAQEQTGQVEECLKVNLLKIKTELCKKEVLNMLKESKADIFVDPVLHTACALDIKHHCAAITPGRGRQMSCLMEALEDKRVRLQPECKKRLNDRIEMWSYAAKVAPADGFSDLAMQVMTSPSKNYILSVISGSICILFLIGLMCGRITKRVTRELKDRLQYRSETMAYKGLVWSQDVTGSPA

SEQ ID NO: 1189 - protein, 68 aa, Homo sapiens
MSGSSSVAAMKKVVQQLRLEAGLNRVKVSQAAADLKQFCLQNAQHDPLLTGVSSSTNPFRPQKVCSFL

SEQ ID NO: 1190 - protein, 558 aa, Homo sapiens
MAALTRDPQFQKLQQWYREHRSELNLRRLFDANKDRFNHFSLTLNTNHGHILVDYSKNLVTEDVMRMLVDLAKSRGVEAARERMFNGEKINYTEGRAVLHVALRNRSNTPILVDGKDVMPEVNKVLDKMKSFCQRVRSGDWKGYTGKTITDVINIGIGGSDLGPLMVTEALKPYSSGGPRVWYVSNIDGTHIAKTLAQLNPESSLFIIASKTFTTQETITNAETAKEWFLQAAKDPSAVAKHFVALSTNTTKVKEFGIDPQNMFEFWDWVGGRYSLWSAIGLSIALHVGFDNFEQLLSGAHWMDQHFRTTPLEKNAPVLLALLGIWYINCFGCETHAMLPYDQYLHRFAAYFQQGDMESNGKYITKSGTRVDHQTGPIVWGEPGTNGQHAFYQLIHQGTKMIPCDFLIPVQTQHPIRKGLHHKILLANFLAQTEALMRGKSTEEARKELQAAGKSPEDLERLLPHKVFEGNRPTNSIVFTKLTPFMLGALVAMYEHKIFVQGIIWDINSFDQWGVELGKQLAKKIEPELDGSAQVTSHDASTNGLINFIKQQREARVQ

SEQ ID NO: 1191 - protein, 371 aa, Homo sapiens
MSHEKSFLVSGDNYPPPNPGYPGGPQPPMPPYAQPPYPGAPYPQPPFQPSPYGQPGYPHGPSPYPQGGYPQGPYPQGGYPQGPYPQEGYPQGPYPQGGYPQGPYPQSPFPPNPYGQPQVFPGQDPDSPQHGNYQEEGPPSYYDNQDFPATNWDDKSIRQAFIRKVFLVLTLQLSVTLSTVSVFTFVAEVKGFVRENVWTYYVSYAVFFISLIVLSCCGDFRRKHPWNLVALSVLTASLSYMVGMIASFYNTEAVIMAVGITTAVCFTVVIFSMQTRYDFTSCMGVLLVSMVVLFIFAILCIFIRNRILEIVYASLGALLFTCFLAVDTQLLLGNKQLSLSPEEYVFAALNLYTDIINIFLYILTIIGRAKE

SEQ ID NO: 1192 - protein, 526 aa, Homo sapiens; identical to SEQ ID NO: 719

SEQ ID NO: 1193 - protein, 1022 aa, Homo sapiens; identical to SEQ ID NO: 721

SEQ ID NO: 1194 - protein, 260 aa, Homo sapiens
MRPEDRMFHIRAVILRALSLAFLLSLRGAGAIKADHVSTYAAFVQTHRPTGEFMFEFDEDEMFYVDLDKKETVWHLEEFGQAFSFEAQGGLANIAILNNNLNTLIQRSNHTQATNDPPEVTVFPKEPVELGQPNTLICHIDKFFPPVLNVTWLCNGELVTEGVAESLFLPRTDYSFHKFHYLTFVPSAEDFYDCRVEHWGLDQPLLKHWEAQEPIQMPETTETVLCALGLVLGLVGIIVGTVLIIKSLRSGHDPRAQGTL

SEQ ID NO: 1195 - protein, 578 aa, Homo sapiens
MLPCLVVLLAALLSLRLGSDAHGTELPSPPSVWFEAEFFHHILHWTPIPNQSESTCYEVALLRYGIESWNSISNCSQTLSYDLTAVTLDLYHSNGYRARVRAVDGSRHSNWTVTNTRFSVDEVTLTVGSVNLEIHNGFILGKIQLPRPKMAPANDTYESIFSHFREYEIAIRKVPGNFTFTHKKVKHENFSLLTSGEVGEFCVQVKPSVASRSNKGMWSKEECISLTRQYFTVTNVIIFFAFVLLLSGALAYCLALQLYVRRRKKLPSVLLFKKPSPFIFISQRPSPETQDTIHPLDEEAFLKVSPELKNLDLHGSTDSGFGSTKPSLQTEEPQFLLPDPHPQADRTLGNREPPVLGDSCSSGSSNSTDSGICLQEPSLSPSTGPTWEQQVGSNSRGQDDSGIDLVQNSEGRAGDTQGGSALGHHSPPEPEVPGEEDPAAVAFQGYLRQTRCAEEKATKTGCLEEESPLTDGLGPKFGRCLVDEAGLHPPALAKGYLKQDPLEMTLASSGAPTGQWNQPTEEWSLLALSSCSDLGISDWSFAHDLAPLGCVAAPGGLLGSFNSDLVTLPLISSLQSSE

SEQ ID NO: 1196 - protein, 184 aa, Homo sapiens
MVRKLKFHEQKLLKQVDFLNWEVTDHNLHELRVLRRYRLQRREDYTRYNQLSRAVRELARRLRDLPERDQFRVRASAALLDKLYALGLVPTRGSLELCDFVTASSFCRRRLPTVLLKLRMAQHLQAAVAFVEQGHVRVGPDVVTDPAFLVTRSMEDFVTWVDSSKIKRHVLEYNEERDDFDLEA

SEQ ID NO: 1197 - protein, 325 aa, Homo sapiens
MPITRMRMRPWLEMQINSNQIPGLIWINKEEMIFQIPWKHAAKHGWDINKDACLFRSWAIHTGRYKAGEKEPDPKTWKANFRCAMNSLPDIEEVKDQSRNKGSSAVRVYRMLPPLTKNQRKERKSKSSRDAKSKAKRKSCGDSSPDTFSDGLSSSTLPDDHSSYTVPGYMQDLEVEQALTPALSPCAVSSTLPDWHIPVEVVPDSTSDLYNFQVSPMPSTSEATTDEDEEGKLPEDIMKLLEQSEWQPTNVDGKGYLLNEPGVQPTSVYGDFSCKEEPEIDSPGGDIGLSLQRVFTDLKNMDATWLDSLLTPVRLPSIQAIPCAP

SEQ ID NO: 1198 - protein, 426 aa, Homo sapiens
MCDRNGGRRLRQWLIEQIDSSMYPGLIWENEEKSMFRIPWKHAGKQDYNQEVDASIFKAWAVFKGKFKEGDKAEPATWKTRLRCALNKSPDFEEVTDRSQLDISEPYKVYRIVPEEEQKCKLGVATAGCVNEVTEMECGRSEIDELIKEPSVDDYMGMIKRSPSPPEACRSQLLPDWWAQQPSTGVPLVTGYTTYDAHHSAFSQMVISFYYGGKLVGQATTTCPEGCRLSLSQPGLPGTKLYGPEGLELVRFPPADAIPSERQRQVTRKLFGHLERGVLLHSSRQGVFVKRLCQGRVFCSGNAVVCKGRPNKLERDEVVQVFDTSQFFRELQQFYNSQGRLPDGRVVLCFGEEFPDMAPLRSKLILVQIEQLYVRQLAEEAGKSCGAGSVMQAPEEPPPDQVFRMFPDICASHQRSFFRENQQITV

SEQ ID NO: 1199 - protein, 347 aa, Homo sapiens
MCTKMEQPFYHDDSYTATGYGRAPGGLSLHDYKLLKPSLAVNLADPYRSLKAPGARGPGPEGGGGGSYFSGQGSDTGASLKLASSELERLIVPNSNGVITTTPTPPGQYFYPRGGGSGGGAGGAGGGVTEEQEGFADGFVKALDDLHKMNHVTPPNVSLGATGGPPAGPGGVYAGPEPPPVYTNLSSYSPASASSGGAGAAVGTGSSYPTTTISYLPHAPPFAGGHPAQLGLGRGASTFKEEPQTVPEARSRDATPPVSPINMEDQERIKVERKRLRNRLAATKCRKRKLERIARLEDKVKTLKAENAGLSSTAGLLREQVAQLKQKVMTHVSNGCQLLLGVKGHAF

SEQ ID NO: 1200 - protein, 1770 aa, Homo sapiens
MSGASVKVAVRVRPFNSRETSKESKCIIQMQGNSTSIINPKNPKEAPKSFSFDYSYWSHTSPEDPCFASQNRVYNDIGKEMLLHAFEGYNVCIFAYGQTGAGKSYTMMGKQEESQAGIIPQLCEELFEKINDNCNEEMSYSVEVSYMEIYCERVRDLLNPKNKGNLRVREHPLLGPYVEDLSKLAVTSYTDIADLMDAGNKARTVAATNMNETSSRSHAVFTIVFTQKKHDNETNLSTEKVSKISLVDLAGSERADSTGAKGTRLKEGANINKSLTTLGKVISALAEVSKKKKKTDFIPYRDSVLTWLLRENLGGNSRTAMVAALSPADINYDETLSTLRYADRAKQIKCNAVINEDPNAKLVRELKEEVTRLKDLLRAQGLGDIIDTSMGSLTSSPSSCSLSSQVGLTSVTSIQERIMSTPGGEEAIERLKESEKIIAELNETWEEKLRKTEAIRMEREALLAEMGVAIREDGGTLGVFSPKKTPHLVNLNEDPLMSECLLYYIKDGITRVGQADAERRQDIVLSGAHIKEEHCIFRSERSNSGEVIVTLEPCERSETYVNGKRVSQPVQLRSGNRIIMGKNHVFRFNHPEQARAEREKTPSAETPSEPVDWTFAQRELLEKQGIDMKQEMEKRLQEMEILYKKEKEEADLLLEQQRLDYESKLQALQKQVETRSLAAETTEEEEEEEEVPWTQHEFELAQWAFRKWKSHQFTSLRDLLWGNAVYLKEANAISVELKKKVQFQFVLLTDTLYSPLPPELLPTEMEKTHEDRPFPRTVVAVEVQDLKNGATHYWSLEKLKQRLDLMREMYDRAGEMASSAQDESETTVTGSDPFYDRFHWFKLVGSSPIFHGCVNERLADRTPSPTFSTADSDITELADEQQDEMEDFDDEAFVDDAGSDAGTEEGSDLFSDGHDPFYDRSPWFILVGRAFVYLSNLLYPVPLIHRVAIVSEKGEVRGFLRVAVQAIAADEEAPDYGSGIRQSGTAKISFDNEYFNQSDFSSVAMTRSGLSLEELRIVEGQGQSSEVITPPEEISRINDLDLKSSTLLDGKMVMEGFSEEIGNHLKLGSAFTFRVTVLQASGILPEYADIFCQFNFLHRHDEAFSTEPLKNNGRGSPLAFYHVQNIAVEITESFVDYIKTKPIVFEVFGHYQQHPLHLQGQELNSPPQPCRRFFPPPMPLSKPVPATKLNTMSKTSLGQSMSKYDLLVWFEISELEPTGEYIPAVVDHTAGLPCQGTFLLHQGIQRRITVTIIHEKGSELHWKDVRELVVGRIRNKPEVDEAAVDAILSLNIISAKYLKSSHNSSRTFYRFEAVWDSSLHNSLLLNRVTPYGEKIYMTLSAYLELDHCIQPAVITKDVCMVFYSRDAKISPPRSLRSLFGSGYSKSPDSNRVTGIYELSLCKMSDTGSPGMQRRRRKILDTSVAYVRGEENLAGWRPRGDSLILEHQWELEKLELLHEVEKTRHFLLLRERLGDSIPKSLSDSLSPSLSSGTLSTSTSISSQISTTTFESAITPSESSGYDSGDIESLVDREKELATKCLQLLTHTFNREFSQVHGSVSDCKLSDISPIGRDPSESSFSSATLTPSSTCPSLVDSRSNSLDQKTPEANSRASSPCPEFEQFQIVPAVETPYLARAGKNEFLNLVPDIEEIRPSSVVSKKGYLHFKEPLYSNWAKHFVVVRRPYVFIYNSDKDPVERGIINLSTAQVEYSEDQQAMVKTPNTFAVCTKHRGVLLQALNDKDMNDWLYAFNPLLAGTIRSKLSRRCPSQSKY

SEQ ID NO: 1201 - protein, 519 aa, Homo sapiens; identical to SEQ ID NO: 757

SEQ ID NO: 1202 - protein, 332 aa, Homo sapiens
MATLKDQLIYNLLKEEQTPQNKITVVGVGAVGMACAISILMKDLADELALVDVIEDKLKGEMMDLQHGSLFLRTPKIVSGKDYNVTANSKLVIITAGARQQEGESRLNLVQRNVNIFKFIIPNVVKYSPNCKLLIVSNPVDILTYVAWKISGFPKNRVIGSGCNLDSARFRYLMGERLGVHPLSCHGWVLGEHGDSSVPVWSGMNVAGVSLKTLHPDLGTDKDKEQWKEVHKQVVESAYEVIKLKGYTSWAIGLSVADLAESIMKNLRRVHPVSTMIKGLYGIKDDVFLSVPCILGQNGISDLVKVTLTSEEEARLKKSADTLWGIQKELQF

SEQ ID NO: 1203 - protein, 655 aa, Homo sapiens
MVAPKSHTDDWAPGPFSSKPQRSQLQIFSSVLQTSLLFLLMGLRASGKDSAPTVVSGILGGSVTLPLNISVDTEIENVIWIGPKNALAFARPKENVTIMVKSYLGRLDITKWSYSLCISNLTLNDAGSYKAQINQRNFEVTTEEEFTLFVYEQLQEPQVTMKSVKVSENFSCNITLMCSVKGAEKSVLYSWTPREPHASESNGGSILTVSRTPCDPDLPYICTAQNPVSQRSSLPVHVGQFCTDPGASRGGTTGETVVGVLGEPVTLPLALPACRDTEKVVWLFNTSIISKEREEAATADPLIKSRDPYKNRVWVSSQDCSLKISQLKIEDAGPYHAYVCSEASSVTSMTHVTLLIYRRLRKPKITWSLRHSEDGICRISLTCSVEDGGNTVMYTWTPLQKEAVVSQGESHLNVSWRSSENHPNLTCTASNPVSRSSHQFLSENICSGPERNTKLWIGLFLMVCLLCVGIFSWCIWKRKGRCSVPAFCSSQAEAPADTPEPTAGHTLYSVLSQGYEKLDTPLRPARQQPTPTSDSSSDSNLTTEEDEDRPEVHKPISGRYEVFDQVTQEGAGHDPAPEGQADYDPVTPYVTEVESVVGENTMYAQVFNLQGKTPVSQKEESSATIYCSIRKPQVVPPPQQNDLEIPESPTYENFT

SEQ ID NO: 1204 - protein, 386 aa, Homo sapiens [sequence omitted]

SEQ ID NO: 1205 - protein, 916 aa, Homo sapiens
MVQKESQATLEERESELSSNPAASAGASLEPPAAPAPGEDNPAGAGGAAVAGAAGGARRFLCGVVEGFYGRPWVMEQRKELFRRLQKWELNTYLYAPKDDYKHRMFWREMYSVEEAEQLMTLISAAREYEIEFIYAISPGLDITFSNPKEVSTLKRKLDQVSQFGCRSFALLFDDIDHNMCAADKEVFSSFAHAQVSITNEIYQYLGEPETFLFCPTEYCGTFCYPNVSQSPYLRTVGEKLLPGIEVLWTGPKVVSKEIPVESIEEVSKIIKRAPVIWDNIHANDYDQKRLFLGPYKGRSTELIPRLKGVLTNPNCEFEANYVAIHTLATWYKSNMNGVRKDVVMTDSEDSTVSIQIKLENEGSDEDIETDVLYSPQMALKLALTEWLQEFGVPHQYSSRQVAHSGAKASVVDGTPLVAAPSLNATTVVTTVYQEPIMSQGAALSGEPTTLTKEEEKKQPDEEPMDMVVEKQEETDHKNDNQILSEIVEAKMAEELKPMDTDKESIAESKSPEMSMQEDCISDIAPMQTDEQTNKEQFVPGPNEKPLYTAEPVTLEDLQLLADLFYLPYEHGPKGAQMLREFQWLRANSSVVSVNCKGKDSEKIEEWRSRAAKFEEMCGLVMGMFTRLSNCANRTILYDMYSYVWDIKSIMSMVKSFVQWLGCRSHSSAQFLIGDQEPWAFRGGLAGEFQRLLPIDGANDLFFQPPPLTPTSKVYTIRPYFPKDEASVYKICREMYDDGVGLPFQSQPDLIGDKLVGGLLSLSLDYCFVLEDEDGICGYALGTVDVTPFIKKCKISWIPFMQEKYTKPNGDKELSEAEKIMLSFHEEQEVLPETFLANFPSLIKMDIHKKVTDPSVAKSMMACLLSSLKANGSRGAFCEVRPDDKRILEFYSKLGCFEIAKMEGFPKDVVILGRSL

SEQ ID NO: 1206 - protein, 1027 aa, Homo sapiens
MVSSDRPVSLEDEVSHSMKEMIGGCCVCSDERGWAENPLVYCDGHGCSVAVHQACYGIVQVPTGPWFCRKCESQERAARVRCELCPHKDGALKRTDNGGWAHVVCALYIPEVQFANVSTMEPIVLQSVPHDRYNKTCYICDEQGRESKAATGACMTCNKHGCRQAFHVTCAQFAGLLCEEEGNGADNVQYCGYCKYHFSKLKKSKRGSNRSYDQSLSDSSSHSQDKHHEKEKKKYKEKDKHKQKHKKQPEPSPALVPSLTVTTEKTYTSTSNNSISGSLKRLEDTTARFTNANFQEVSAHTSSGKDVSETRGSEGKGKKSSAHSSGQRGRKPGGGRNPGTTVSAASPFPQGSFSGTPGSVKSSSGSSVQSPQDFLSFTDSDLRNDSYSHSQQSSATKDVHKGESGSQEGGVNSFSTLIGLPSTSAVTSQPKSFENSPGDLGNSSLPTAGYKRAQTSGIEEETVKEKKRKGNKQSKHGPGRPKGNKNQENVSHLSVSSASPTSSVASAAGSITSSSLQKSPTLLRNGSLQSLSVGSSPVGSEISMQYRHDGACPTTTFSELLNAIHNDRGDSSTLTKQELKFIGIYNSNDVAVSFPNVVSGSGSSTPVSSSHLPQQSSGHLQQVGALSPSAVSSAAPAVATTQANTLSGSSLSQAPSHMYGNRSNSSMAALIAQSENNQTDQDLGDNSRNLVGRGSSPRGSLSPRSPVSSLQIRYDQPGNSSLENLPPVAASIEQLLERQWSEGQQFLLEQGTPSDILGMLKSLHQLQVENRRLEEQIKNLTAKKERLQLLNAQLSVPFPTITANPSPSHQIHTFSAQTAPTTDSLNSSKSPHIGNSFLPDNSLPVLNQDLTSSGQSTSSSSALSTPPPAGQSPAQQGSGVSGVQQVNGVTVGALASGMQPVTSTIPAVSAVGGIIGALPGNQLAINGIVGALNGVMQTPVTMSQNPTPLTHTTVPPNATHPMPATLTNSASGLGLLSDQQRQILIHQQQFQQLLNSQQLTPVHRHPHFTQLPPTHFSPSMEIMQVRK

SEQ ID NO: 1207 - protein, 309 aa, Homo sapiens
MRPDRAEAPGPPAMAAGGPGAGSAAPVSSTSSLPLAALNMRVRRRLSLFLNVRTQVAADWTALAEEMDFEYLEIRQLETQADPTGRLLDAWQGRPGASVGRLLELLTKLGRDDVLLELGPSIEEDCQKYILKQQQEEAEKPLQVAAVDSSVPRTAELAGITTLDDPLGHMPERFDAFICYCPSDIQFVQEMIRQLEQTNYRLKLCVSDRDVLPGTCVWSIASELIEKRCRRMVVVVSDDYLQSKECDFQTKFALSLSPGAHQKRLIPIKYKAMKKEFPSILRFITVCDYTNPCTKSWFWTRLAKALSLP

SEQ ID NO: 1208 - protein, 462 aa, Homo sapiens
MQLRKMQTVKKEQASLDASSNVDKMMVLNSALTEVSEDSTTGEELLLSEGSVGKNKSSACRRKREFIPDEKKDAMYWEKRRKNNEAAKRSREKRRLNDLVLENKLIALGEENATLKAELLSLKLKFGLISSTAYAQEIQKLSNSTAVYFQDYQTSKSNVSSFVDEHEPSMVSSSCISVIKHSPQSSLSDVSEVSSVEHTQESSVQGSCRSPENKFQIIKQEPMELESYTREPRDDRGSYTASIYQNYMGNSFSGYSHSPPLLQVNRSSSNSPRTSETDDGVVGKSSDGEDEQQVPKGPIHSPVELKHVHATVVKVPEVNSSALPHKLRIKAKAMQIKVEAFDNEFEATQKLSSPIDMTSKRHFELEKHSAPSMVHSSLTPFSVQVTNIQDWSLKSEHWHQKELSGKTQNSFKTGVVEMKDSGYKVSDPENLYLKQGIANLSAEVVSLKRLIATQPISASDSG

SEQ ID NO: 1209 - protein, 317 aa, Homo sapiens
MFQAAERPQEWAMEGPRDGLKKERLLDDRHDSGLDSMKDEEYEQMVKELQEIRLEPQEVPRGSEPWKQQLTEDGDSFLHLAIIHEEKALTMEVIRQVKGDLAFLNFQNNLQQTPLHLAVITNQPEIAEALLGAGCDPELRDFRGNTPLHLACEQGCLASVGVLTQSCTTPHLHSILKATNYNGHTCLHLASIHGYLGIVELLVSLGADVNAQEPCNGRTALHLAVDLQNPDLVSLLLKCGADVNRVTYQGYSPYQLTWGRPSTRIQQQLGQLTLENLQMLPESEDEESYDTESEFTEFTEDELPYDDCVFGGQRLTL

SEQ ID NO: 1210 - protein, 301 aa, Homo sapiens; identical to SEQ ID NO: 821

SEQ ID NO: 1211 - protein, 640 aa, Homo sapiens; identical to SEQ ID NO: 826

SEQ ID NO: 1212 - protein, 1436 aa, Homo sapiens
MLHLSAAPPAPPPEVTATARPCLCSVGRRGDGGKMAAAGALERSFVELSGAERERPRHFREFTVCSIGTANAVAGAVKYSESAGGFYYVESGKLFSVTRNRFIHWKTSGDTLELMEESLDINLLNNAIRLKFQNCSVLPGGVYVSETQNRVIILMLTNQTVHRLLLPHPSRMYRSELVVDSQMQSIFTDIGKVDFTDPCNYQLIPAVPGISPNSTASTAWLSSDGEALFALPCASGGIFVLKLPPYDIPGMVSVVELKQSSVMQRLLTGWMPTAIRGDQSPSDRPLSLAVHCVEHDAFIFALCQDHKLRMWSYKEQMCLMVADMLEYVPVKKDLRLTAGTGHKLRLAYSPTMGLYLGIYMHAPKRGQFCIFQLVSTESNRYSLDHISSLFTSQETLIDFALTSTDIWALWHDAENQTVVKYINFEHNVAGQWNPVFMQPLPEEEIVIRDDQDPREMYLQSLFTPGQFTNEALCKALQIFCRGTERNLDLSWSELKKEVTLAVENELQGSVTEYEFSQEEFRNLQQEFWCKFYACCLQYQEALSHPLALHLNPHTNMVCLLKKGYLSFLIPSSLVDHLYLLPYENLLTEDETTISDDVDIARDVICLIKCLRLIEESVTVDMSVIMEMSCYNLQSPEKAAEQILEDMITIDVENVMEDICSKLQEIRNPIHAIGLLIREMDYETEVEMEKGFNPAQPLNIRMNLTQLYGSNTAGYIVCRGVHKIASTRFLICRDLLILQQLLMRLGDAVIWGTGQLFQAQQDLLHRTAPLLLSYYLIKWGSECLATDVPLDTLESNLQHLSVLELTDSGALMANRFVSSPQTIVELFFQEVARKHIISHLFSQPKAPLSQTGLNWPEMITAITSYLLQLLWPSNPGCLFLECLMGNCQYVQLQDYIQLLHPWCQVNVGSCRFMLGRCYLVTGEGQKALECFCQAASEVGKEEFLDRLIRSEDGEIVSTPRLQYYDKVLRLLDVIGLPELVIQLATSAITEAGDDWKSQATLRTCIFKHHLDLGHNSQAYEALTQIPDSSRQLDCLRQLVVVLCERSQLQDLVEFPYVNLHNEVVGIIESRARAVDLMTHNYYELLYAFHIYRHNYRKAGTVMFEYGMRLGREVRTLRGLEKQGNCYLAALNCLRLIRPEYAWIVQPVSGAVYDRPGASPKRNHDGECTAAPTNRQIEILELEDLEKECSLARIRLTLAQHDPSAVAVAGSSSAEEMVTLLVQAGLFDTAISLCQTFKLPLTPVFEGLAFKCIKLQFGGEAAQAEAWAWLAANQLSSVITTKESSATDEAWRLLSTYLERYKVQNNLYHHCVINKLLSHGVPLPNWLINSYKKVDAAELLRLYLNYDLLEEAVDLVSEYVDAVLGKGHQYFGIEFPLSATAPMVWLPYSSIDQLLQALGENSANSHNIALSQKILDKLEDYQQKVDKATRDLLYRRTL

SEQ ID NO: 1213 - protein, 356 aa, Homo sapiens
MDAGVTESGLNVTLTIRLLMHGKEVGSIIGKKGESVKRIREESGARINISEGNCPERIITLTGPTNAIFKAFAMIIDKLEEDINSSMTNSTAASRPPVTLRLVVPATQCGSLIGKGGCKIKEIRESTGAQVQVAGDMLPNSTERAITIAGVPQSVTECVKQICLVMLETLSQSPQGRVMTIPYQPMPASSPVICAGGQDRCSDAAGYPHATHDLEGPPLDAYSIQGQHTISPLDLAKLNQVARQQSHFAMMHGGTGFAGIDSSSPEVKGYWASLDASTQTTHELTIPNNLIGCIIGRQGANINEIRQMSGAQIKIANPVEGSSGRQVTITGSAASISLAQYLINARLSSEKGMGCS

SEQ ID NO: 1214 - protein, 399 aa, Homo sapiens
MAHITINQYLQQVYEAIDSRDGASCAELVSFKHPHVANPRLQMASPEEKCQQVLEPPYDEMFAAHLRCTYAVGNHDFIEAYKCQTVIVQSFLRAFQAHKEENWALPVMYAVALDLRVFANNADQQLVKKGKSKVGDMLEKAAELLMSCFRVCASDTRAGIEDSKKWGMLFLVNQLFKIYFKINKLHLCKPLIRAIDSSNLKDDYSTAQRVTYKYYVGRKAMFDSDFKQAEEYLSFAFEHCHRSSQKNKRMILIYLLPVKMLLGHMPTVELLKKYHLMQFAEVTRAVSEGNLLLLHEALAKHEAFFIRCGIFLILEKLKIITYRNLFKKVYLLLKTHQLSLDAFLVALKFMQVEDVDIDEVQCILANLIYMGHVKGYISHQHQKLVVSKQNPFPPLSTVC

SEQ ID NO: 1215 - protein, 285 aa, Homo sapiens
MPGARSGGSGGDGSNSGSYSGDASGAVTVWEVVSLLGKLLGTVVALKVVLYLLRVCLAMAWKSGGASHSELIHNLRKNGIIKTDKVFEVMLATDRSHYAKCNPYMDSPQSIGFQATISAPHMHAYALELLFDQLHEGAKALDVGSGSGILTACFARMVGCTGKVIGIDHIKELVDDSVNNVRKDDPTLLSSGRVQLVVGDGRMGYAEEAPYDAIHVGAAAPVVPQALIDQLKPGGRLILPVGPAGGNQMLEQYDKLQDGSIKMKPLMGVIYVPLTDKEKQWSRWK

SEQ ID NO: 1216 - protein, 483 aa, Homo sapiens
MAQADIALIGLAVMGQNLILNMNDHGFVVCAFNRTVSKVDDFLANEAKGTKVVGAQSLKEMVSKLKKPRRIILLVKAGQAVDDFIEKLVPLLDTGDIIIDGGNSEYRDTTRRCRDLKAKGILFVGSGVSGGEEGARYGPSLMPGGNKEAWPHIKTIFQGIAAKVGTGEPCCDWVGDEGAGHFVKMVHNGIEYGDMQLICEAYHLMKDVLGMAQDEMAQAFEDWNKTELDSFLIEITANILKFQDTDGKHLLPKIRDSAGQKGTGKWTAISALEYGVPVTLIGEAVFARCLSSLKDERIQASKKLKGPQKFQFDGDKKSFLEDIRKALYASKIISYAQGFMLLRQAATEFGWTLNYGGIALMWRGGCIIRSVFLGKIKDAFDRNPELQNLLLDDFFKSAVENCQDSWRRAVSTGVQAGIPMPCFTTALSFYDGYRHEMLPASLIQAQRDYFGAHTYELLAKPGQFIHTNWTGHGGTVSSSSYNA

SEQ ID NO: 1217 - protein, 335 aa, Homo sapiens
MGHPPLLPLLLLLHTCVPASWGLRCMQCKTNGDCRVEECALGQDLCRTTIVRLWEEGEELELVEKSCTHSEKTNRTLSYRTGLKITSLTEVVCGLDLCNQGNSGRAVTYSRSRYLECISCGSSDMSCERGRHQSLQCRSPEEQCLDVVTHWIQEGEEGRPKDDRHLRGCGYLPGCPGSNGFHNNDTFHFLKCCNTTKCNEGPILELENLPQNGRQCYSCKGNSTHGCSSEETFLIDCRGPMNQCLVATGTHEPKNQSYMVRGCATASMCQHAHLGDAFSMNHIDVSCCTKSGCNHPDLDVQYRSGAAPQPGPAHLSLTITLLMTARLWGGTLLWT

SEQ ID NO: 1218 - protein, 318 aa, Homo sapiens
MDKQNSQMNASHPETNLPVGYPPQYPPTAFQGPPGYSGYPGPQVSYPPPPAGHSGPGPAGFPVPNQPVYNQPVYNQPVGAAGVPWMPAPQPPLNCPPGLEYLSQIDQILIHQQIELLEVLTGFETNNKYEIKNSFGQRVYFAAEDTDCCTRNCCGPSRPFTLRIIDNMGQEVITLERPLRCSSCCCPCCLQEIEIQAPPGVPIGYVIQTWHPCLPKFTIQNEKREDVLKISGPCVVCSCCGDVDFEIKSLDEQCVVGKISKHWTGILREAFTDADNFGIQFPLDLDVKMKAVMIGACFLIDFMFFESTGSQEQKSGVW

SEQ ID NO: 1219 - protein, 141 aa, Homo sapiens
MNARGLGSELKDSIPVTELSASGPFESHDLLRKGFSCVKNELLPSHPLELSEKNFQLNQDKMNFSTLRNIQGLFAPLKLQMEFKAVQQVQRLPFLSSSNLSLDVLRGNDETIGFEDILNDPSQSEVMGEPHLMVEYKLGLL

SEQ ID NO: 1220 - protein, 727 aa, Homo sapiens
MQQKTKLFLQALKYSIPHLGKCMQKQHLNHYNFADHCYNRIKLKKYHLTKCLQNKPKISELARNIPSRSFSCKDLQPVKQENEKPLPENMDAFEKVRTKLETQPQEEYEIINVEVKHGGFVYYQEGCCLVRSKDEEADNDNYEVLFNLEELKLDQPFIDCIRVAPDEKYVAAKIRTEDSEASTCVIIKLSDQPVMEASFPNVSSFEWVKDEEDEDVLFYTFQRNLRCHDVYRATFGDNKRNERFYTEKDPSYFVFLYLTKDSRFLTINIMNKTTSEVWLIDGLSPWDPPVLIQKRIHGVLYYVEHRDDELYILTNVGEPTEFKLMRTAADTPAIMNWDLFFTMKRNTKVIDLDMFKDHCVLFLKHSNLLYVNVIGLADDSVRSLKLPPWACGFIMDTNSDPKNCPFQLCSPIRPPKYYTYKFAEGKLFEETGHEDPITKTSRVLRLEAKSKDGKLVPMTVFHKTDSEDLQKKPLLVHVYGAYGMDLKMNFRPERRVLVDDGWILAYCHVRGGGELGLQWHADGRLTKKLNGLADLEACIKTLHGQGFSQPSLTTLTAFSAGGVLAGALCNSNPELVRAVTLEAPFLDVLNTMMDTTLPLTLEELEEWGNPSSDEKHKNYIKRYCPYQNIKPQHYPSIHITAYENDERVPLKGIVSYTEKLKEAIAEHAKDTGEGYQTPNIILDIQPGGNHVIEDSHKKITAQIKFLYEELGLDSTSVFEDLKKYLKF

SEQ ID NO: 1221 - protein, 676 aa, Homo sapiens; identical to SEQ ID NO: 870

SEQ ID NO: 1222 - protein, 221 aa, Homo sapiens
MSDGDYDYLIKFLALGDSGVGKTSVLYQYTDGKFNSKFITTVGIDFREKRVVYRASGPDGATGRGQRIHLQLWDTAGQERFRSLTTAFFRDAMGFLLLFDLTNEQSFLNVRNWISQLQMHAYCENPDIVLCGNKSDLEDQRVVKEEEAIALAEKYGIPYFETSAANGTNISQAIEMLLDLIMKRMERCVDKSWIPEGVVRSNGHASTDQLSEEKEKGACGC

SEQ ID NO: 1223 - protein, 207 aa, Homo sapiens; identical to SEQ ID NO: 887

SEQ ID NO: 1224 - protein, 206 aa, Homo sapiens; identical to SEQ ID NO: 889

SEQ ID NO: 1225 - protein, 406 aa, Homo sapiens; identical to SEQ ID NO: 893

SEQ ID NO: 1226 - protein, 219 aa, Homo sapiens
MDSGTRPVGSCCSSPAGLSREYKLVMLGAGGVGKSAMTMQFISHRFPEDHDPTIEDAYKIRIRIDDEPANLDILDTAGQAEFTAMRDQYMRAGEGFIICYSITDRRSFHEVREFKQLIYRVRRTDDTPVVLVGNKSDLKQLRQVTKEEGLALAREFSCPFFETSAAYRYYIDDVFHALVREIRRKEKEAVLAMEKKSKPKNSVWKRLKSPFRKKKDSVT

SEQ ID NO: 1227 - protein, 204 aa, Homo sapiens [sequence omitted]

SEQ ID NO: 1228 - protein, 128 aa, Homo sapiens [sequence omitted]

SEQ ID NO: 1229 - protein, 192 aa, Homo sapiens [sequence omitted]

SEQ ID NO: 1230 - protein, 151 aa, Homo sapiens [sequence omitted]

SEQ ID NO: 1231 - protein, 263 aa, Homo sapiens [sequence omitted]

SEQ ID NO: 1232 - protein, 199 aa, Homo sapiens
MDGQKKNWKDKVVDLLYWRDIKKTGVVFGASLFLLLSLTVFSIVSVTAYIALALLSVTISFRIYKGVIQAIQKSDEGHPFRAYLESEVAISEELVQKYSNSALGHVNCTIKELRRLFLVDDLVDSLKFAVLMWVFTYVGALFNGLTLLILALISLFSVPVIYERHQAQIDHYLGLANKNVKDAMAKIQAKIPGLKRKAE

SEQ ID NO: 1233 - protein, 360 aa, Homo sapiens
MFVARSIAADHKDLIHDVSFDFHGRRMATCSSDQSVKVWDKSESGDWHCTASWKTHSGSVWRVTWAHPEFGQVLASCSFDRTAAVWEEIVGESNDKLRGQSHWVKRTTLVDSRTSVTDVKFAPKHMGLMLATCSADGIVRIYEAPDVMNLSQWSLQHEISCKLSCSCISWNPSSSRAHSPMIAVGSDDSSPNAMAKVQIFEYNENTRKYAKAETLMTVTDPVHDIAFAPNLGRSFHILAIATKDVRIFTLKPVRKELTSSGGPTKFEIHIVAQFDNHNSQVWRVSWNITGTVLASSGDDGCVRLWKANYMDNWKCTGILKGNGSPVNGSSQQGTSNPSLGSTIPSLQNSLNGSSAGRKHS

SEQ ID NO: 1234 - protein, 387 aa, Homo sapiens
MPGHLQEGFGCVVTNRFDQLFDDESDPFEVLKAAENKKKEAGGGGVGGPGAKSAAQAAAQTNSNAAGKQLRKESQKDRKNPLPPSVGVVDKKEETQPPVALKKEGIRRVGRRPDQQLQGEGKIIDRRPERRPPRERRFEKPLEEKGEGGEFSVDRPIIDRPIRGRGGLGRGRGGRGRGMGRGDGFDSRGKREFDRHSGSDRSGLKHEDKRGGSGSHNWGTVKDELTDLDQSNVTEETPEGEEHHPVADTENKENEVEEVKEEGPKEMTLDEWKAIQNKDRAKVEFNIRKPNEGADGQWKKGFVLHKSKSEEAHAEDSVMDHHFRKPANDITSQLEINFGDLGRPGRGGRGGRGGRGRGGRPNRGSRTDKSSASAPDVDDPEAFPALA

SEQ ID NO: 1235 - protein, 379 aa, Homo sapiens
MEQLSSANTRFALDLFLALSENNPAGNIFISPFSISSAMAMVFLGTRGNTAAQLSKTFHFNTVEEVHSRFQSLNADINKRGASYILKLANRLYGEKTYNFLPEFLVSTQKTYGADLASVDFQHASEDARKTINQWVKGQTEGKIPELLASGMVDNMTKLVLVNAIYFKGNWKDKFMKEATTNAPFRLNKKDRKTVKMMYQKKKFAYGYIEDLKCRVLELPYQGEELSMVILLPDDIEDESTGLKKIEEQLTLEKLHEWTKPENLDFIEVNVSLPRFKLEESYTLNSDLARLGVQDLFNSSKADLSGMSGARDIFISKIVHKSFVEVNEEGTEAAAATAGIATFCMLMPEENFTADHPFLFFIRHNSSGSILFLGRFSSP

SEQ ID NO: 1236 - protein, 314 aa, Homo sapiens; identical to SEQ ID NO: 920

SEQ ID NO: 1237 - protein, 2677 aa, Homo sapiens
MSTCCWCTPGGASTIDFLKRYASNTPSGEFQTADEDLCYCLECVAEYHKARDELPFLHEVLWELETLRLINHFEKSMKAEIGDDDELYIVDNNGEMPLFDITGQDFENKLRVPLLEILKYPYLLLHERVNELCVEALCRMEQANCSFQVFDKHPGIYLFLVHPNEMVRRWAILTARNLGKVDRDDYYDLQEVLLCLFKVIELGLLESPDIYTSSVLEKGKLILLPSHMYDTTNYKSYWLGICMLLTILEEQAMDSLLLGSDKQNDFMQSILHTMEREADDDSVDPFWPALHCFMVILDRLGSKVWGQLMDPIVAFQTIINNASYNREIRHIRNSSVRTKLEPESYLDDMVTCSQIVYNYNPEKTKKDSGWRTAICPDYCPNMYEEMETLASVLQSDIGQDMRVHNSTFLWFIPFVQSLMDLKDLGVAYIAQVVNHLYSEVKEVLNQTDAVCDKVTEFFLLILVSVIELHRNKKCLHLLWVSSQQWVEAVVKCAKLPTTAFTRSSEKSSGNCSKGTAMISSLSLHSMPSNSVQLAYVQLIRSLLKEGYQLGQQSLCKRFWDKLNLFLRGNLSLGWQLTSQETHELQSCLKQIIRNIKFKAPPCNTFVDLTSACKISPASYNKEESEQMGKTSRKDMHCLEASSPTFSKEPMKVQDSVLIKADNTIEGDNNEQNYIKDVKLEDHLLAGSCLKQSSKNIFTERAEDQIKISTRKQKSVKEISSYTPKDCTSRNGPERGCDRGIIVSTRLLTDSSTDALEKVSTSNEDFSLKDDALAKTSKRKTKVQKDEICAKLSHVIKKQHRKSTLVDNTINLDENLTVSNIESFYSRKDTGVQKGDGFIHNLSLDPSGVLDDKNGEQKSQNNVLPKEKQLKNEELVIFSFHENNCKIQEFHVDGKELIPFTEMTNASEKKSSPFKDLMTVPESRDEEMSNSTSVIYSNLTREQAPDISPKSDTLTDSQIDRDLHKLSLLAQASVITFPSDSPQNSSQLQRKVKEDKRCFTANQNNVGDTSRGQVIIISDSDDDDDERILSLEKLTKQDKICLEREHPEQHVSTVNSKEEKNPVKEEKTETLFQFEESDSQCFEFESSSEVFSVWQDHPDDNNSVQDGEKKCLAPIANTTNGQGCTDYVSEVVKKGAEGIEEHTRPRSISVEEFCEIEVKKPKRKRSEKPMAEDPVRPSSSVRNEGQSDTNKRDLVGNDFKSIDRRTSTPNSRIQRATTVSQKKSSKLCTCTEPIRKVPVSKTPKKTHSDAKKGQNRSSNYLSCRTTPAIVPPKKFRQCPEPTSTAEKLGLKKGPRKAYELSQRSLDYVAQLRDHGKTVGVVDTRKKTKLISPQNLSVRNNKKLLTSQELQMQRQIRPKSQKNRRRLSDCESTDVKRAGSHTAQNSDIFVPESDRSDYNCTGGTEVLANSNRKQLIKCMPSEPETIKAKHGSPATDDACPLNQCDSVVLNGTVPTNEVIVSTSEDPLGGGDPTARHIEMAALKEGEPDSSSDAEEDNLFLTQNDPEDMDLCSQMENDNYKLIELIHGKDTVEVEEDSVSRPQLESLSGTKCKYKDCLETTKNQGEYCPKHSEVKAADEDVFRKPGLPPPASKPLRPTTKIFSSKSTSRIAGLSKSLETSSALSPSLKNKSKGIQSILKVPQPVPLIAQKPVGEMKNSCNVLHPQSPNNSNRQGCKVPFGESKYFPSSSPVNILLSSQSVSDTFVKEVLKWKYEMFLNFGQCGPPASLCQSISRPVPVRFHNYGDYFNVFFPLMVLNTFETVAQEWLNSPNRENFYQLQVRKFPADYIKYWEFAVYLEECELAKQLYPKENDLVFLAPERINEEKKDTERNDIQDLHEYHSGYVHKFRRTSVMRNGKTECYLSIQTQENFPANLNELVNCIVISSLVTTQRKLKAMSLLGSRNQLARAVLNPNPMDFCTKDLLTTTSERIIAYLRDFNEDQKKAIETAYAMVKHSPSVAKICLIHGPPGTGKSKTIVGLLYRLLTENQRKGHSDENSNAKIKQNRVLVCAPSNAAVDELMKKIILEFKEKCKDKKNPLGNCGDINLVRLGPEKSINSEVLKFSLDSQVNHRMKKELPSHVQAMHKRKEFLDYQLDELSRQRALCRGGREIQRQELDENISKVSKERQELASKIKEVQGRPQKTQSIIILESHIICCTLSTSGGLLLESAFRGQGGVPFSCVIVDEAGQSCEIETLTPLIHRCNKLILVGDPKQLPPTVISMKAQEYGYDQSMMARFCRLLEENVEHNMISRLPILQLTVQYRMHPDICLFPSNYVYNRNLKTNRQTEAIRCSSDWPFQPYLVFDVGDGSERRDNDSYINVQEIKLVMEIIKLIKDKRKDVSFRNIGIITHYKAQKTMIQKDLDKEFDRKGPAEVDTVDAFQGRQKDCVIVTCVRANSIQGSIGFLASLQRLNVTITRAKYSLFILGHLRTLMENQHWNQLIQDAQKRGAIIKTCDKNYRHDAVKILKLKPVLQRSLTHPPTIAPEGSRPQGGLPSSKLDSGFAKTSVAASLYHTPSDSKEITLTVTSKDPERPPVHDQLQDPRLLKRMGIEVKGGIFLWDPQPSSPQHPGATPPTGEPGFPVVHQDLSHIQQPAAVVAALSSHKPPVRGEPPAASPEASTCQSKCDDPEEELCHRREARAFSEGEQEKCGSETHHTRRNSRWDKRTLEQEDSSSKKRKLL

SEQ ID NO: 1238 - protein, 365 aa, Homo sapiens
MNIMDFNVKKLAADAGTFLSRAVQFTEEKLGQAEKTELDAHLENLLSKAECTKIWTEKIMKQTEVLLQPNPNARIEEFVYEKLDRKAPSRINNPELLGQYMIDAGTEFGPGTAYGNALIKCGETQKRIGTADRELIQTSALNFLTPLRNFIEGDYKTIAKERKLLQNKRLDLDAAKTRLKKAKAAETRNSSEQELRITQSEFDRQAEITRLLLEGISSTHAHHLRCLNDFVEAQMTYYAQCYQYMLDLQKQLGSFPSNYLSNNNQTSVTPVPSVLPNAIGSSAMASTSGLVITSPSNLSDLKECSGSRKARVLYDYDAANSTELSLLADEVITVFSVVGMDSDWLMGERGNQKGKVPITYLELLN

SEQ ID NO: 1239 - protein, 335 aa, Homo sapiens
MAGSPTCLTLIYILWQLTGSAASGPVKELVGSVGGAVTFPLKSKVKQVDSIVWTFNTTPLVTIQPEGGTIIVTQNRNRERVDFPDGGYSLKLSKLKKNDSGIYYVGIYSSSLQQPSTQEYVLHVYEHLSKPKVTMGLQSNKNGTCVTNLTCCMEHGEEDVIYTWKALGQAANESHNGSILPISWRWGESDMTFICVARNPVSRNFSSPILARKLCEGAADDPDSSMVLLCLLLVPLLLSLFVLGLFLWFLKRERQEEYIEEKKRVDICRETPNICPHSGENTEYDTIPHTNRTILKEDPANTVYSTVEIPKKMENPHSLLTMPDTPRLFAYENVI

SEQ ID NO: 1240 - protein, 225 aa, Homo sapiens
MVTHSKFPAAGMSRPLDTSLRLKTFSSKSEYQLVVNAVRKLQESGFYWSAVTGGEANLLLSAEPAGTFLIRDSSDQRHFFTLSVKTQSGTKNLRIQCEGGSFSLQSDPRSTQPVPRFDCVLKLVHHYMPPPGAPSFPSPPTEPSSEVPEQPSAQPLPGSPPRRAYYIYSGGEKIPLVLSRPLSSNVATLQHLCRKTVNGHLDSYEKVTQLPGPIREFLDQYDAPL

SEQ ID NO: 1241 - protein, 831 aa, Homo sapiens
MERPWGAADGLSRWPHGLGLLLLLQLLPPSTLSQDRLDAPPPPAAPLPRWSGPIGVSWGLRAAAAGGAFPRGGRWRRSAPGEDEECGRVRDFVAKLANNTHQHVFDDLRGSVSLSWVGDSTGVILVLTTFHVPLVIMTFGQSKLYRSEDYGKNFKDITDLINNTFIRTEFGMAIGPENSGKVVLTAEVSGGSRGGRIFRSSDFAKNFVQTDLPFHPLTQMMYSPQNSDYLLALSTENGLWVSKNFGGKWEEIHKAVCLAKWGSDNTIFFTTYANGSCKADLGALELWRTSDLGKSFKTIGVKIYSFGLGGRFLFASVMADKDTTRRIHVSTDQGDTWSMAQLPSVGQEQFYSILAANDDMVFMHVDEPGDTGFGTIFTSDDRGIVYSKSLDRHLYTTTGGETDFTNVTSLRGVYITSVLSEDNSIQTMITFDQGGRWTHLRKPENSECDATAKNKNECSLHIHASYSISQKLNVPMAPLSEPNAVGIVIAHGSVGDAISVMVPDVYISDDGGYSWTKMLEGPHYYTILDSGGIIVAIEHSSRPINVIKFSTDEGQCWQTYTFTRDPIYFTGLASEPGARSMNISIWGFTESFLTSQWVSYTIDFKDILERNCEEKDYTIWLAHSTDPEDYEDGCILGYKEQFLRLRKSSVCQNGRDYVVTKQPSICLCSLEDFLCDFGYYRPENDSKCVEQPELKGHDLEFCLYGREEHLTTNGYRKIPGDKCQGGVNPVREVKDLKKKCTSNFLSPEKQNSKSNSVPIILAIVGLMLVTVVAGVLIVKKYVCGGRFLVHRYSVLQQHAEANGVDGVDALDTASHTNKSGYHDDSDEDLLE

SEQ ID NO: 1242 - protein, 270 aa, Homo sapiens
MLQACKMEGFPLVPPPSEDLVPYDTDLYQRQTHEYYPYLSSDGESHSDHYWDFHPHHVHSEFESFAENNFTELQSVQPPQLQQLYRHMELEQMHVLDTPMVPPHPSLGHQVSYLPRMCLQYPSLSPAQPSSDEEEGERQSPPLEVSDGEADGLEPGPGLLPGETGSKKKIRLYQFLLDLLRSGDMKDSIWWVDKDKGTFQFSSKHKEALAHRWGIQKGNRKKMTYQKMARALRNYGKTGEVKKVKKKLTYQFSGEVLGRGGLAERRHPPH

SEQ ID NO: 1243 - protein, 450 aa, Homo sapiens
MVPLVAVVSGPRAQLFACLLRLGTQQVGPLQLHTGASHAARNHYEVLVLGGGSGGITMAARMKRKVGAENVAIVEPSERHFYQPIWTLVGAGAKQLSSSGRPTASVIPSGVEWIKARVTELNPDKNCIHTDDDEKISYRYLIIALGIQLDYEKIKGLPEGFAHPKIGSNYSVKTVEKTWKALQDFKEGNAIFTFPNTPVKCAGAPQKIMYLSEAYFRKTGKRSKANIIFNTSLGAIFGVKKYADALQEIIQERNLTVNYKKNLIEVRADKQEAVFENLDKPGETQVISYEMLHVTPPMSPPDVLKTSPVADAAGWVDVDKETLQHRRYPNVFGIGDCTNLPTSKTAAAVAAQSGILDRTISVIMKNQTPTKKYDGYTSCPLVTGYNRVILAEFDYKAEPLETFPFDQSKERLSMYLMKADLMPFLYWNMMLRGYWGGPAFLRKLFHLGMS

SEQ ID NO: 1244 - protein, 769 aa, Homo sapiens
MAQWNQLQQLDTRYLEQLHQLYSDSFPMELRQFLAPWIESQDWAYAASKESHATLVFHNLLGEIDQQYSRFLQESNVLYQHNLRRIKQFLQSRYLEKPMEIARIVARCLWEESRLLQTAATAAQQGGQANHPTAAVVTEKQQMLEQHLQDVRKRVQDLEQKMKVVENLQDDFDFNYKTLKSQGDMQDLNGNNQSVTRQKMQQLEQMLTALDQMRRSIVSELAGLLSAMEYVQKTLTDEELADWKRRQQIACIGGPPNICLDRLENWITSLAESQLQTRQQIKKLEELQQKVSYKGDPIVQHRPMLEERIVELFRNLMKSAFVVERQPCMPMHPDRPLVIKTGVQFTTKVRLLVKFPELNYQLKIKVCIDKDSGDVAALRGSRKFNILGTNTKVMNMEESNNGSLSAEFKHLTLREQRCGNGGRANCDASLIVTEELHLITFETEVYHQGLKIDLETHSLPVVVISNICQMPNAWASILWYNMLTNNPKNVNFFTKPPIGTWDQVAEVLSWQFSSTTKRGLSIEQLTTLAEKLLGPGVNYSGCQITWAKFCKENMAGKGFSFWVWLDNIIDLVKKYILALWNEGYIMGFISKERERAILSTKPPGTFLLRFSESSKEGGVTFTWVEKDISGKTQIQSVEPYTKQQLNNMSFAEIIMGYKIMDATNILVSPLVYLYPDIPKEEAFGKYCRPESQEHPEADPGAAPYLKTKFICVTPTTCSNTIDLPMSPRTLDSLMQFGNNGEGAEPSAGGQFESLTFDMELTSECATSPM

SEQ ID NO: 1245 - protein, 432 aa, Homo sapiens
MASPVAAQAGKLLRALALRPRFLAAGSQAVQLTSRRWLNLQEYQSKKLMSDNGVRVQRFFVADTANEALEAAKRLNAKEIVLKAQILAGGRGKGVFNSGLKGGVHLTKDPNVVGQLAKQMIGYNLATKQTPKEGVKVNKVMVAEALDISRETYLAILMDRSCNGPVLVGSPQGGVDIEEVAASNPELIFKEQIDIFEGIKDSQAQRMAENLGFVGPLKSQAADQITKLYNLFLKIDATQVEVNPFGETPEGQVVCFDAKINFDDNAEFRQKDIFAMDDKSENEPIENEAAKYDLKYIGLDGNIACFVNGAGLAMATCDIIFLNGGKPANFLDLGGGVKEAQVYQAFKLLTADPKVEAILVNIFGGIVNCAIIANGITKACRELELKVPLVVRLEGTNVQEAQKILNNSGLPITSAIDLEDAAKKAVASVAKK

SEQ ID NO: 1246 - protein, 425 aa, Homo sapiens
MDKNIGEQLNKAYEAFRQACMDRDSAVKELQQKTENYEQRIREQQEQLSLQQTIIDKLKSQLLLVNSTQDNNYGCVPLLEDSETRKNNLTLDQPQDKVISGIAREKLPKVRRQEVSSPRKETSARSLGSPLLHERGNIEKTFWDLKEEFHKICMLAKAQKDHLSKLNIPDTATETQCSVPIQCTDKTDKQEALFKPQAKDDINRGAPSITSVTPRGLCRDEEDTSFESLSKFNVKFPPMDNDSTFLHSTPERPGILSPATSEAVCQEKFNMEFRDNPGNFVKTEETLFEIQGIDPIASAIQNLKTTDKTKPSNLVNTCIRTTLDRAACLPPGDHNALYVNSFPLLDPSDAPFPSLDSPGKAIRGPQQPIWKPFPNQDSDSVVLSGTDSELHIPRVCEFCQAVFPPSITSRGDFLRHLNSHFNGET

SEQ ID NO: 1247 - protein, 808 aa, Homo sapiens
MAELLASAGSACSWDFPRAPPSFPPPAASRGGLGGTRSFRPHRGAESPRPGRDRDGVRVPMASSRCPAPRGCRCLPGASLAWLGTVLLLLADWVLLRTALPRIFSLLVPTALPLLRVWAVGLSRWAVLWLGACGVLRATGGSKSENAGAQGWLAALKPLAAALGLALPGLALFRELISWGAPGSADSTRLLHWGSHPTAFVVSYAAALPAAALWHKLGSLWVPGGQGGSGNPVRRLLGCLGSETRRLSLFLVLVVLSSLGEMAIPFFTGRLTDWILQDGSADTFTRNLTLMSILTIASAVLEFVGDGIYNNTMGHVHSHLQGEVFGAVLRQETEFFQQNQTGNIMSRVTEDTSTLSDSLSENLSLFLWYLVRGLCLLGIMLWGSVSLTMVTLITLPLLFLLPKKVGKWYQLLEVQVRESLAKSSQVAIEALSAMPTVRSFANEEGEAQKFREKLQEIKTLNQKEAVAYAVNSWTTSISGMLLKVGILYIGGQLVTSGAVSSGNLVTFVLYQMQFTQAVEVLLSIYPRVQKAVGSSEKIFEYLDRTPRCPPSGLLTPLHLEGLVQFQDVSFAYPNRPDVLVLQGLTFTLRPGEVTALVGPNGSGKSTVAALLQNLYQPTGGQLLLDGKPLPQYEHRYLHRQVAAVGQEPQVFGRSLQENIAYGLTQKPTMEEITAAAVKSGAHSFISGLPQGYDTEVDEAGSQLSGGQRQAVALARALIRKPCVLILDDATSALDANSQLQVEQLLYESPERYSRSVLLITQHLSLVEQADHILFLEGGAIREGGTHQQLMEKKGCYWAMVQAPADAPE

SEQ ID NO: 1248 - protein, 667 aa, Homo sapiens
MHHQQRMAALGTDKELSDLLDFSAMFSPPVSSGKNGPTSLASGHFTGSNVEDRSSSGSWGNGGHPSPSRNYGDGTPYDHMTSRDLGSHDNLSPPFVNSRIQSKTERGSYSSYGRESNLQGCHQQSLLGGDMDMGNPGTLSPTKPGSQYYQYSSNNPRRRPLHSSAMEVQTKKVRKVPPGLPSSVYAPSASTADYNRDSPGYPSSKPATSTFPSSFFMQDGHHSSDPWSSSSGMNQPGYAGMLGNSSHIPQSSSYCSLHPHERLSYPSHSSADINSSLPPMSTFHRSGTNHYSTSSCTPPANGTDSIMANRGSGAAGSSQTGDALGKALASIYSPDHTNNSFSSNPSTPVGSPPSLSAGTAVWSRNGGQASSSPNYEGPLHSLQSRIEDRLERLDDAIHVLRNHAVGPSTAMPGGHGDMHGIIGPSHNGAMGGLGSGYGTGLLSANRHSLMVGTHREDGVALRGSHSLLPNQVPVPQLPVQSATSPDLNPPQDPYRGMPPGLQGQSVSSGSSEIKSDDEGDENLQDTKSSEDKKLDDDKKDIKSITSNNDDEDLTPEQKAEREKERRMANNARERLRVRDINEAFKELGRMVQLHLKSDKPQTKLLILHQAVAVILSLEQQVRERNLNPKAACLKRREEEKVSSEPPPLSLAGPHPGMGDASNHMGQM

SEQ ID NO: 1249 - protein, 830 aa, Homo sapiens
MGSMFRSEEVALVQLFLPTAAAYTCVSRLGELGLVEFRDLNASVSAFQRRFVVDVRRCEELEKTFTFLQEEVRRAGLVLPPPKGRLPAPPPRDLLRIQEETERLAQELRDVRGNQQALRAQLHQLQLHAAVLRQGHEPQLAAAHTDGASERTPLLQAPGGPHQDLRVNFVAGAVEPHKAPALERLLWRACRGFLIASFRELEQPLEHPVTGEPATWMTFLISYWGEQIGQKIRKITDCFHCHVFPFLQQEEARLGALQQLQQQSQELQEVLGETERFLSQVLGRVLQLLPPGQVQVHKMKAVYLALNQCSVSTTHKCLIAEAWCSVRDLPALQEALRDSSMEEGVSAVAHRIPCRDMPPTLIRTNRFTASFQGIVDAYGVGRYQEVNPAPYTIITFPFLFAVMFGDVGHGLLMFLFALAMVLAENRPAVKAAQNEIWQTFFRGRYLLLLMGLFSIYTGFIYNECFSRATSIFPSGWSVAAMANQSGWSDAFLAQHTMLTLDPNVTGVFLGPYPFGIDPIWSLAANHLSFLNSFKMKMSVILGVVHMAFGVVLGVFNHVHFGQRHRLLLETLPELTFLLGLFGYLVFLVIYKWLCVWAARAASAPSILIHFINMFLFSHSPSNRLLYPRQEVVQATLVVLALAMVPILLLGTPLHLLHRHRRRLRRRPADRQEENKAGLLDLPDASVNGWSSDEEKAGGLDDEEEAELVPSEVLMHQAIHTIEFCLGCVSNTASYLRLWALSLAHAQLSEVLWAMVMRIGLGLGREVGVAAVVLVPIFAAFAVMTVAILLVMEGLSAFLHALRLHWVEFQNKFYSGTGYKLSPFTFAATDD

SEQ ID NO: 1250 - protein, 220 aa, Homo sapiens
MGAAARTLRLALGLLLLATLLRPADACSCSPVHPQQAFCNADVVIRAKAVSEKEVDSGNDIYGNPIKRIQYEIKQIKMFKGPEKDIEFIYTAPSSAVCGVSLDVGGKKEYLIAGKAEGDGKMHITLCDFIVPWDTLSTTQKKSLNHRYQMGCECKITRCPMIPCYISSPDECLWMDWVTEKNINGHQAKFFACIKRSDGSCAWYRGAAPPKQEFLDIEDP

SEQ ID NO: 1251 - protein, 274 aa, Homo sapiens
MGKSLSHLPLHSSKEDAYDGVTSENMRNGLVNSEVHNEDGRNGDVSQFPYVEFTGRDSVTCPTCQGTGRIPRGQENQLVALIPYSDQRLRPRRTKLYVMASVFVCLLLSGLAVFFLFPRSIDVKYIGVKSAYVSYDVQKRTIYLNITNTLNITNNNYYSVEVENITAQVQFSKTVIGKARLNNITIIGPLDMKQIDYTVPTVIAEEMSYMYDFCTLISIKVHNIVLMMQVTVTTTYFGHSEQISQERYQYVDCGRNTTYQLGQSEYLNVLQPQQ

SEQ ID NO: 1252 - protein, 158 aa, Homo sapiens
MAGFLDNFRWPECECIDWSERRNAVASVVAGILFFTGWWIMIDAAVVYPKPEQLNHAFHTCGVFSTLAFFMINAVSNAQVRGDSYESGCLGRTGARVWLFIGFMLMFGSLIASMWILFGAYVTQNTDVYPGLAVFFQNALIFFSTLIYKFGRTEELWT

SEQ ID NO: 1253 - protein, 636 aa, Homo sapiens; identical to SEQ ID NO: 965

SEQ ID NO: 1254 - protein, 1621 aa, Homo sapiens
MAKSGGCGAGAGVGGGNGALTWVNNAAKKEESETANKNDSSKKLSVERVYQKKTQLEHILLRPDTYIGSVEPLTQFMWVYDEDVGMNCREVTFVPGLYKIFDEILVNAADNKQRDKNMTCIKVSIDPESNIISIWNNGKGIPVVEHKVEKVYVPALIFGQLLTSSNYDDDEKKVTGGRNGYGAKLCNIFSTKFTVETACKEYKHSFKQTWMNNMMKTSEAKIKHFDGEDYTCITFQPDLSKFKMEKLDKDIVALMTRRAYDLAGSCRGVKVMFNGKKLPVNGFRSYVDLYVKDKLDETGVALKVIHELANERWDVCLTLSEKGFQQISFVNSIATTKGGRHVDYVVDQVVGKLIEVVKKKNKAGVSVKPFQVKNHIWVFINCLIENPTFDSQTKENMTLQPKSFGSKCQLSEKFFKAASNCGIVESILNWVKFKAQTQLNKKCSSVKYSKIKGIPKLDDANDAGGKHSLECTLILTEGDSAKSLAVSGLGVIGRDRYGVFPLRGKILNVREASHKQIMENAEINNIIKIVGLQYKKSYDDAESLKTLRYGKIMIMTDQDQDGSHIKGLLINFIHHNWPSLLKHGFLEEFITPIVKASKNKQELSFYSIPEFDEWKKHIENQKAWKIKYYKGLGTSTAKEAKEYFADMERHRILFRYAGPEDDAAITLAFSKKKIDDRKEWLTNFMEDRRQRRLHGLPEQFLYGTATKHLTYNDFINKELILFSNSDNERSIPSLVDGFKPGQRKVLFTCFKRNDKREVKVAQLAGSVAEMSAYHHGEQALMMTIVNLAQNFVGSNNINLLQPIGQFGTRLHGGKDAASPRYIFTMLSTLARLLFPAVDDNLLKFLYDDNQRVEPEWYIPIIPMVLINGAEGIGTGWACKLPNYDAREIVNNVRRMLDGLDPHPMLPNYKNFKGTIQELGQNQYAVSGEIFVVDRNTVEITELPVRTWTQVYKEQVLEPMLNGTDKTPALISDYKEYHTDTTVKFVVKMTEEKLAQAEAAGLHKVFKLQTTLTCNSMVLFDHMGCLKKYETVQDILKEFFDLRLSYYGLRKEWLVGMLGAESTKLNNQARFILEKIQGKITIENRSKKDLIQMLVQRGYESDPVKAWKEAQEKAAEEDETQNQHDDSSSDSGTPSGPDFNYILNMSLWSLTKEKVEELIKQRDAKGREVNDLKRKSPSDLWKEDLAAFVEELDKVESQEREDVLAGMSGKAIKGKVGKPKVKKLQLEETMPSPYGRRIIPEITAMKADASKKLLKKKKGDLDTAAVKVEFDEEFSGAPVEGAGEEALTPSVPINKGPKPKREKKEPGTRVRKTPTSSGKPSAKKVKKRNPWSDDESKSESDLEETEPVVIPRDSLLRRAAAERPKYTFDFSEEEDDDADDDDDDNNDLEELKVKASPITNDGEDEFVPSDGLDKDEYTFSPGKSKATPEKSLHDKKSQDFGNLFSFPSYSQKSEDDSAKFDSNEEDSASVFSPSFGLKQTDKVPSKTVAAKKGKPSSDTVPKPKRAPKQKKVVEAVNSDSDSEFGIPKKTTTPKGKGRGAKKRKASGSENEGDYNPGRKTSKTTSKKPKKTSFDQDSDVDIFPSDFPTEPPSLPRTGRARKEVKYFAESDEEEDDVDFAMFN

SEQ ID NO: 1255 - protein, 563 aa, Homo sapiens
MGLQACLLGLFALILSGKCSYSPEPDQRRTLPPGWVSLGRADPEEELSLTFALRQQNVERLSELVQAVSDPSSPQYGKYLTLENVADLVRPSPLTLHTVQKWLLAAGAQKCHSVITQDFLTCWLSIRQAELLLPGAEFHHYVGGPTETHVVRSPHPYQLPQALAPHVDFVGGLHRFPPTSSLRQRPEPQVTGTVGLHLGVTPSVIRKRYNLTSQDVGSGTSNNSQACAQFLEQYFHDSDLAQFMRLFGGNFAHQASVARVVGQQGRGRAGIEASLDVQYLMSAGANISTWVYSSPGRHEGQEPFLQWLMLLSNESALPHVHTVSYGDDEDSLSSAYIQRVNTELMKAAARGLTLLFASGDSGAGCWSVSGRHQFRPTFPASSPYVTTVGGTSFQEPFLITNEIVDYISGGGFSNVFPRPSYQEEAVTKFLSSSPHLPPSSYFNASGRAYPDVAALSDGYWVVSNRVPIPWVSGTSASTPVFGGILSLINEHRILSGRPPLGFLNPRLYQQHGAGLFDVTRGCHESCLDEEVEGQGFCSGPGWDPVTGWGTPNFPALLKTLLNP

SEQ ID NO: 1256 - protein, 551 aa, Homo sapiens
MISPDPRPSPGLARWAESYEAKCERRQEIRESRRCRPNVTTCRQVGKTLRIQQREQLQRARLQQFFRRRNLELEEKGKAQHPQAREQGPSRRPGQVTVLKEPLSCARRISSPREQVTGTSSEVFPAQHPPPSGICRDLSDHLSSQAGGLPPQDTPIKKPPKHHRGTQTKAEGPTIKNDASQQTNYGVAVLDKEIIQLSDYLKEALQRELVLKQKMVILQDLLSTLIQASDSSWKGQLNEDKLKGKLRSLENQLYTCTQKYSPWGMKKVLLEMEDQKNSYEQKAKESLQKVLEEKMNAEQQLQSTQRSLALAEQKCEEWRSQYEALKEDWRTLGTQHRELESQLHVLQSKLQGADSRDLQMNQALRFLENEHQQLQAKIECLQGDRDLCSLDTQDLQDQLKRSEAEKLTLVTRVQQLQGLLQNQSLQLQEQEKLLTKKDQALPVWSPKSFPNEVEPEGTGKEKDWDLRDQLQKKTLQLQAKEKECRELHSELDNLSDEYLSCLRKLQHCREELNQSQQLPPRRQCGRWLPVLMVVIAAALAVFLANKDNLMI

SEQ ID NO: 1257 - protein, 372 aa, Homo sapiens
MRVGPVRSAMSGASQPRGPALLFPATRGVPAKRLLDADDAAAVAAKCPRLSECSSPPDYLSPPGSPCSPQPPPAAPGAGGGSGSAPGPSRIADYLLLPLAEREHVSRALCIHTGRELRCKVFPIKHYQDKIRPYIQLPSHSNITGIVEVILGETKAYVFFEKDFGDMHSYVRSRKRLREEEAARLFKQIVSAVAHCHQSAIVLGDLKLRKFVFSTEERTQLRLESLEDTHIMKGEDDALSDKHGCPAYVSPEILNTTGTYSGKAADVWSLGVMLYTLLVGRYPFHDSDPSALFSKIRRGQFCIPEHISPKARCLIRSLLRREPSERLTAPEILLHPWFESVLEPGYIDSEIGTSDQIVPEYQEDSDISSFFC

SEQ ID NO: 1258 - protein, 467 aa, Homo sapiens
MASVAAARAVPVGSGLRGLQRTLPLVVILGATGTGKSTLALQLGQRLGGEIVSADSMQVYEGLDIITNKVSAQEQRICRHHMISFVDPLVTNYTVVDFRNRATALIEDIFARDKIPIVVGGTNYYIESLLWKVLVNTKPQEMGTEKVIDRKVELEKEDGLVLHKRLSQVDPEMAAKLHPHDKRKVARSLQVFEETGISHSEFLHRQHTEEGGGPLGGPLKFSNPCILWLHADQAVLDERLDKRVDDMLAAGLLEELRDFHRRYNQKNVSENSQDYQHGIFQSIGFKEFHEYLITEGKCTLETSNQLLKKGIEALKQVTKRYARKQNRWVKNRFLSRPGPIVPPVYGLEVSDVSKWEESVLEPALEIVQSFIQGHKPTATPIKMPYNEAENKRSYHLCDLCDRIIIGDREWAAHIKSKSHLNQLKKRRRLDSDAVNTIESQSVSPDHNKEPKEKGSPGQNDQELKCSV

SEQ ID NO: 1259 - protein, 538 aa, Homo sapiens
MEESVNQMQPLNEKQIANSQDGYVWQVTDMNRLHRFLCFGSEGGTYYIKEQKLGLENAEALIRLIEDGRGCEVIQEIKSFSQEGRTTKQEPMLFALAICSQCSDISTKQAAFKAVSEVCRIPTHLFTFIQFKKDLKESMKCGMWGRALRKAIADWYNEKGGMALALAVTKYKQRNGWSHKDLLRLSHLKPSSEGLAIVTKYITKGWKEVHELYKEKALSVETEKLLKYLEAVEKVKRTRDELEVIHLIEEHRLVREHLLTNHLKSKEVWKALLQEMPLTALLRNLGKMTANSVLEPGNSEVSLVCEKLCNEKLLKKARIHPFHILIALETYKTGHGLRGKLKWRPDEEILKALDAAFYKTFKTVEPTGKRFLLAVDVSASMNQRVLGSILNASTVAAAMCMVVTRTEKDSYVVAFSDEMVPCPVTTDMTLQQVLMAMSQIPAGGTDCSLPMIWAQKTNTPADVFIVFTDNETFAGGVHPAIALREYRKKMDIPAKLIVCGMTSNGFTIADPDDRGMLDMCGFDTGALDVIRNFTLDMI

SEQ ID NO: 1260 - protein, 797 aa, Homo sapiens
MAAAPVAAGSGAGRGRRSAATVAAWGGWGGRPRPGNILLQLRQGQLTGRGLVRAVQFTETFLTERDKQSKWSGIPQLLLKLHTTSHLHSDFVECQNILKEISPLLSMEAMAFVTEERKLTQETTYPNTYIFDLFGGVDLLVEILMRPTISIRGQKLKISDEMSKDCLSILYNTCVCTEGVTKRLAEKNDFVIFLFTLMTSKKTFLQTATLIEDILGVKKEMIRLDEVPNLSSLVSNFDQQQLANFCRILAVTISEMDTGNDDKHTLLAKNAQQKKSLSLGPSAAEINQAALLSIPGFVERLCKLATRKVSESTGTASFLQELEEWYTWLDNALVLDALMRVANEESEHNQASIVFPPPGASEENGLPHTSARTQLPQSMKIMHEIMYKLEVLYVLCVLLMGRQRNQVHRMIAEFKLIPGLNNLFDKLIWRKHSASALVLHGHNQNCDCSPDITLKIQFLRLLQSFSDHHENKYLLLNNQELNELSAISLKANIPEVEAVLNTDRSLVCDGKRGLLTRLLQVMKKEPAESSFRFWQARAVESFLRGTTSYADQMFLLKRGLLEHILYCIVDSECKSRDVLQSYFDLLGELMKFNVDAFKRFNKYINTDAKFQVFLKQINSSLVDSNMLVRCVTLSLDRFENQVDMKVAEVLSECRLLAYISQVPTQMSFLFRLINIIHVQTLTQENVSCLNTSLVILMLARRKERLPLYLRLLQRMEHSKKYPGFLLNNFHNLLRFWQQHYLHKDKDSTCLENSSCISFSYWKETVSILLNPDRQSPSALVSYIEEPYMDIDRDFTEE

SEQ ID NO: 1261 - protein, 169 aa, Homo sapiens; identical to SEQ ID NO: 184

SEQ ID NO: 1262 - protein, 1141 aa, Homo sapiens
MAAAVGVRGRYELPPCSGPGWLLSLSALLSVAARGAFATTHWVVTEDGKIQQQVDSPMNLKHPHDLVILMRQEATVNYLKELEKQLVAQKIHIEENEDRDTGLEQRHNKEDPDCIKAKVPLGDLDLYDGTYITLESKDISPEDYIDTESPVPPDPEQPDCTKILELPYSIHAFQHLRGVQERVNLSAPLLPKEDPIFTYLSKRLGRSIDDIGHLIHEGLQKNTSSWVLYNMASFYWRIKNEPYQVVECAMRALHFSSRHNKDIALVNLANVLHRAHFSADAAVVVHAALDDSDFFTSYYTLGNIYAMLGEYNHSVLCYDHALQARPGFEQAIKRKHAVLCQQKLEQKLEAQHRSLQRTLNELKEYQKQHDHYLRQQEILEKHKLIQEEQILRNIIHETQMAKEAQLGNHQICRLVNQQHSLHCQWDQPVRYHRGDIFENVDYVQFGEDSSTSSMMSVNFDVQSNQSDINDSVKSSPVAHSILWIWGRDSDAYRDKQHILWPKRADCTESYPRVPVGGELPTYFLPPENKGLRIHELSSDDYSTEEEAQTPDCSITDFRKSHTLSYLVKELEVRMDLKAKMPDDHARKILLSRINNYTIPEEEIGSFLFHAINKPNAPIWLILNEAGLYWRAVGNSTFAIACLQRALNLAPLQYQDVPLVNLANLLIHYGLHLDATKLLLQALAINSSEPLTFLSLGNAYLALKNISGALEAFRQALKLTTKCPECENSLKLIRCMQFYPFLYNITSSVCSGTVVEESNGSDEMENSDETKMSEEILALVDEFQQAWPLEGFGGALEMKGRRLDLQGIRVLKKGPQDGVARSSCYGDCRSEDDEATEWITFQVKRVKKPKGDHKKTPGKKVETGQIENGHRYQANLEITGPKVASPGPQGKKRDYQRLGWPSPDECLKLRWVELTAIVSTWLAVSSKNIDITEHIDFATPIQQPAMEPLCNGNLPTSMHTLDHLHGVSNRASLHYTGESQLTEVLQNLGKDQYPQQSLEQIGTRIAKVLEKNQTSWVLSSMAALYWRVKGQGKKAIDCLRQALHYAPHQMKDVPLISLANILHNAKLWNDAVIVATMAVEIAPHFAVNHFTLGNVYVAMEEFEKALVWYESTLKLQPEFVPAKNRIQTIQCHLMLKKGRRSP

SEQ ID NO: 1263 - protein, 451 aa, Homo sapiens [sequence omitted]

SEQ ID NO: 1264 - protein, 153 aa, Homo sapiens; identical to SEQ ID NO: 978

SEQ ID NO: 1265 - protein, 85 aa, Homo sapiens
MSKVSFKITLTSDPRLPYKVLSVPESTPFTAVLKFAAEEFKVPAATSAIITNDGIGINPAQTAGNVFLKHGSELRIIPRDRVGSC

SEQ ID NO: 1266 - protein, 310 aa, Homo sapiens
MAATGANAEKAESHNDCPVRLLNPNIAKMKEDILYHFNLTTSRHNFPALFGDVKFVCVGGSPSRMKAFIRCVGAELGLDCPGRDYPNICAGTDRYAMYKVGPVLSVSHGMGIPSISIMLHELIKLLYYARCSNVTIIRIGTSGGIGLEPGTVVITEQAVDTCFKAEFEQIVLGKRVIRKTDLNKKLVQELLLCSAELSEFTTVVGNTMCTLDFYEGQGRLDGALCSYTEKDKQAYLEAAYAAGVRNIEMESSVFAAMCSACGLQAAVVCVTLLNRLEGDQISSPRNVLSEYQQRPQRLVSYFIKKKLSKA

SEQ ID NO: 1267 - protein, 3546 aa, Homo sapiens
MCENCADLVEVLNEISDVEGGDGLQLRKEHTLKIFTYINSWTQRQCLCCFKEYKHLEIFNQVVCALINLVIAQVQVLRDQLCKHCTTINIDSTWQDESNQAEEPLNIDRECNEGSTERQKSIEKKSNSTRICNLTEEESSKSSDPFSLWSTDEKEKLLLCVAKIFQIQFPLYTAYKHNTHPTIEDISTQESNILGAFCDMNDVEVPLHLLRYVCLFCGKNGLSLMKDCFEYGTPETLPFLIAHAFITVVSNIRIWLHIPAVMQHIIPFRTYVIRYLCKLSDQELRQSAARNMADLMWSTVKEPLDTTLCFDKESLDLAFKYFMSPTLTMRLAGLSQITNQLHTFNDVCNNESLVSDTETSIAKELADWLISNNVVEHIFGPNLHIEIIKQCQVILNFLAAEGRLSTQHIDCIWAAAQLKHCSRYIHDLFPSLIKNLDPVPLRHLLNLVSALEPSVHTEQTLYLASMLIKALWNNALAAKAQLSKQSSFASLLNTNIPIGNKKEEEELRRTAPSPWSPAASPQSSDNSDTHQSGGSDIEMDEQLINRTKHVQQRLSDTEESMQGSSDETANSGEDGSSGPGSSSGHSDGSSNEVNSSHASQSAGSPGSEVQSEDIADIEALKEEDEDDDHGHNPPKSSCGTDLRNRKLESQAGICLGDSQGMSERNGTSSGTGKDLVFNTESLPSVDNRMRMLDACSHSEDPEHDISGEMNATHIAQGSQESCITRTGDFLGETIGNELFNCRQFIGPQHHHHHHHHHHHHDGHMVDDMLSADDVSCSSSQVSAKSEKNMADFDGEESGCEEELVQINSHAELTSHLQQHLPNLASIYHEHLSQGPVVHKHQFNSNAVTDINLDNVCKKGNTLLWDIVQDEDAVNLSEGLINEAEKLLCSLVCWFTDRQIRMRFIEGCLENLGNNRSVVISLRLLPKLFGTFQQFGSSYDTHWITMWAEKELNMMKLFFDNLVYYIQTVREGRQKHALYSHSAEVQVRLQFLTCVFSTLGSPDHFRLSLEQVDILWHCLVEDSECYDDALHWFLNQVRSKDQHAMGMETYKHLFLEKMPQLKPETISMTGLNLFQHLCNLARLATSAYDGCSNSELCGMDQFWGIALRAQSGDVSRAAIQYINSYYINGKTGLEKEQEFISKCMESLMIASSSLEQESHSSLMVIERGLLMLKTHLEAFRRRFAYHLRQWQIEGTGISSHLKALSDKQSLPLRVVCQPAGLPDKMTIEMYPSDQVADLRAEVTHWYENLQKEQINQQAQLQEFGQSNRKGEFPGGLMGPVRMISSGHELTTDYDEKALHELGFKDMQMVFVSLGAPRRERKGEGVQLPASCLPPPQKDNIPMLLLLQEPHLTTLFDLLEMLASFKPPSGKVAVDDSESLRCEELHLHAENLSRRVWELLMLLPTCPNMLMAFQNISDEQSNDGFNWKELLKIKSAHKLLYALEIIEALGKPNRRIRRESTGSYSDLYPDSDDSSEDQVENSKNSWSCKFVAAGGLQQLLEIFNSGILEPKEQESWTVWQLDCLACLLKLICQFAVDPSDLDLAYHDVFAWSGIAESHRKRTWPGKSRKAAGDHAKGLHIPRLTEVFLVLVQGTSLIQRLMSVAYTYDNLAPRVLKAQSDHRSRHEVSHYSMWLLVSWAHCCSLVKSSLADSDHLQDWLKKLTLLIPETAVRHESCSGLYKLSLSGLDGGDSINRSFLLLAASTLLKFLPDAQALKPIRIDDYEEEPILKPGCKEYFWLLCKLVDNIHIKDASQTTLLDLDALARHLADCIRSREILDHQDGNVEDDGLTGLLRLATSVVKHKPPFKFSREGQEFLRDIFNLLFLLPSLKDRQQPKCKSHSSRAAAYDLLVEMVKGSVENYRLIHNWVMAQHMQSHAPYKWDYWPHEDVRAECRFVGLTNLGATCYLASTIQQLYMIPEARQAVFTAKYSEDMKHKTTLLELQKMFTYLMESECKAYNPRPFCKTYTMDKQPLNTGEQKDMTEFFTDLITKIEEMSPELKNTVKSLFGGVITNNVVSLDCEHVSQTAEEFYTVRCQVADMKNIYESLDEVTIKDTLEGDNMYTCSHCGKKVRAEKRACFKKLPRILSFNTMRYTFNMVTMMKEKVNTHFSFPLRLDMTPYTEDFLMGKSERKEGFKEVSDHSKDSESYEYDLIGVTVHTGTADGGHYYSFIRDIVNPHAYKNNKWYLFNDAEVKPFDSAQLASECFGGEMTTKTYDSVTDKFMDFSFEKTHSAYMLFYKRMEPEEENGREYKFDVSSELLEWIWHDNMQFLQDKNIFEHTYFGFMWQLCSCIPSTLPDPKAVSLMTAKLSTSFVLETFIHSKEKPTMLQWIELLTKQFNNSQAACEWFLDRMADDDWWPMQILIKCPNQIVRQMFQRLCIHVIQRLRPVHAHLYLQPGMEDGSDDMDTSVEDIGGRSCVTRFVRTLLLIMEHGVKPHSKHLTEYFAFLYEFAKMGEEESQFLLSLQAISTMVHFYMGTKGPENPQVEVLSEEEGEEEEEEEDILSLAEEKYRPAALEKMIALVALLVEQSRSERHLTLSQTDMAALTGGKGFPFLFQHIRDGINIRQTCNLIFSLCRYNNRLAEHIVSMLFTSIAKLTPEAANPFFKLLTMLMEFAGGPPGMPPFASYILQRIWEVIEYNPSQCLDWLAVQTPRNKLAHSWVLQNMENWVERFLLAHNYPRVRTSAAYLLVSLIPSNSFRQMFRSTRSLHIPTRDLPLSPDTTVVLHQVYNVLLGLLSRAKLYVDAAVHGTTKLVPYFSFMTYCLISKTEKLMFSTYFMDLWNLFQPKLSEPAIATNHNKQALLSFWYNVCADCPENIRLIVQNPVVTKNIAFNYILADHDDQDVVLFNRGMLPAYYGILRLCCEQSPAFTRQLASHQNIQWAFKNLTPHASQYPGAVEELFNLMQLFIAQRPDMREEELEDIKQFKKTTISCYLRCLDGRSCWTTLISAFRILLESDEDRLLVVFNRGLILMTESFNTLHMMYHEATACHVTGDLVELLSIFLSVLKSTRPYLQRKDVKQALIQWQERIEFAHKLLTLLNSYSPPELRNACIDVLKELVLLSPHDFLHTLVPFLQHNHCTYHHSNIPMSLGPYFPCRENIKLIGGKSNIRPPRPELNMCLLPTMVETSKGKDDVYDRMLLDYFFSYHQFIHLLCRVAINCEKFTETLVKLSVLVAYEGLPLHLALFPKLWTELCQTQSAMSKNCIKLLCEDPVFAEYIKCILMDERTFLNNNIVYTFMTHFLLKVQSQVFSEANCANLISTLITNLISQYQNLQSDFSNRVEISKASASLNGDLRALALLLSVHTPKQLNPALIPTLQELLSKCRTCLQQRNSLQEQEAKERKTKDDEGATPIKRRRVSSDEEHTVDSCISDMKTETREVLTPTSTSDNETRDSSIIDPGTEQDLPSPENSSVKEYRMEVPSSFSEDMSNIRSQHAEEQSNNGRYDDCKEFKDLHCSKDSTLAEEESEFPSTSISAVLSDLADLRSCDGQALPSQDPEVALSLSCGHSRGLFSHMQQHDILDTLCRTIESTIHVVTRISGKGNQAAS

SEQ ID NO: 1268 - protein, 100 aa, Homo sapiens; identical to SEQ ID NO: 987

SEQ ID NO: 1269 - protein, 471 aa, Homo sapiens
MPNSEPASLLELFNSIATQGELVRSLKAGNASKDEIDSAVKMLVSLKMSYKAAAGEDYKADCPPGNPAPTSNHGPDATEAEEDFVDPWTVQTSSAKGIDYDKLIVRFGSSKIDKELINRIERATGQRPHHFLRRGIFFSHRDMNQVLDAYENKKPFYLYTGRGPSSEAMHVGHLIPFIFTKWLQDVFNVPLVIQMTDDEKYLWKDLTLDQAYSYAVENAKDIIACGFDINKTFIFSDLDYMGMSSGFYKNVVKIQKHVTFNQVKGIFGFTDSDCIGKISFPAIQAAPSFSNSFPQIFRDRTDIQCLIPCAIDQDPYFRMTRDVAPRIGYPKPALLHSTFFPALQGAQTKMSASDPNSSIFLTDTAKQIKTKVNKHAFSGGRDTIEEHRQFGGNCDVDVSFMYLTFFLEDDDKLEQIRKDYTSGAMLTGELKKALIEVLQPLIAEHQARRKEVTDEIVKEFMTPRKLSFDFQ

SEQ ID NO: 1270 - protein, 502 aa, Homo sapiens
MSGGPMGGRPGGRGAPAVQQNIPSTLLQDHENQRLFEMLGRKCLTLATAVVQLYLALPPGAEHWTKEHCGAVCFVKDNPQKSYFIRLYGLQAGRLLWEQELYSQLVYSTPTPFFHTFAGDDCQAGLNFADEDEAQAFRALVQEKIQKRNQRQSGDRRQLPPPPTPANEERRGGLPPLPLHPGGDQGGPPVGPLSLGLATVDIQNPDITSSRYRGLPAPGPSPADKKRSGKKKISKADIGAPSGFKHVSHVGWDPQNGFDVNNLDPDLRSLFSRAGISEAQLTDAETSKLIYDFIEDQGGLEAVRQEMRRQEPLPPPPPPSRGGNQLPRPPIVGGNKGRSGPLPPVPLGIAPPPPTPRGPPPPGRGGPPPPPPPATGRSGPLPPPPPGAGGPPMPPPPPPPPPPPSSGNGPAPPPLPPALVPAGGLAPGGGRGALLDQIRQGIQLNKTPGAPESSALQPPPQSSEGLVGALMHVMQKRSRAIHSSDEGEDQAGDEDEDDEWDD

SEQ ID NO: 1271 - protein, 693 aa, Homo sapiens
MIAPLLCILSYNFNTFAILNVYSKLTMFCTTNSLPMDLLLKQGSLKQEVESFCYQIVSESNDQKVGILQSEDKQLQPSVSKKSEGELSRVKFISNSNKITFSKKPKRRKYDESYLSFGFTYFGNRDAPHAQCVLCKKILSNSSLAPSKLRRHLETKHAAYKDKDISFFKQHLDSPENNKPPTPKIVNTDNESATEASYNVSYHIALSGEAHTIGELLIKPCAKDVVMRMFDEQYSKKIDAVQLSNSTVARRIKDLAADIEEELVCRLKICDGFSLQLDESADVSGLAVLLVFVRYRFNKSIEEDLLLCESLQSNATGEEIFNCINSFMQKHEIEWEKCVDVCSDASRAVDGKIAEAVTLIKYVAPESTSSHCLLYRHALAVKIMPTSLKNVLDQAVQIINYIKARPHQSRLLKILCEEMGAQHTALLLNTEVRWLSRGKVLVRLFELRRELLVFMDSAFRLSDCLTNSSWLLRLAYLADIFTKLNEVNLSMQGKNVTVFTVFDKMSSLLRKLEFWASSVEEENFDCFPTLSDFLTEINSTVDKDICSAIVQHLRGLRATLLKYFPVTNDNNAWVRNPFTVTVKPASLVARDYESLIDLTSDSQVKQNFSELSLNDFWSSLIQEYPSIARRAVRVLLPFATMHLCETGFSYYAATKTKYRKRLDAAPHMRIRLSNITPNIKRICDKKTQKHCSH

SEQ ID NO: 1272 - protein, 602 aa, Homo sapiens
MARLTKRRQADTKAIQHLWAAIEIIRNQKQIANIDRITKYMSRVHGMHPKETTRQLSLAVKDGLIVETLTVGCKGSKAGIEQEGYWLPGDEIDWETENHDWYCFECHLPGEVLICDLCFRVYHSKCLSDEFRLRDSSSPWQCPVCRSIKKKNTNKQEMGTYLRFIVSRMKERAIDLNKKGKDNKHPMYRRLVHSAVDVPTIQEKVNEGKYRSYEEFKADAQLLLHNTVIFYGADSEQADIARMLYKDTCHELDELQLCKNCFYLSNARPDNWFCYPCIPNHELVWAKMKGFGFWPAKVMQKEDNQVDVRFFGHHHQRAWIPSENIQDITVNIHRLHVKRSMGWKKACDELELHQRFLREGRFWKSKNEDRGEEEAESSISSTSNEQLKVTQEPRAKKGRRNQSVEPKKEEPEPETEAVSSSQEIPTMPQPIEKVSVSTQTKKLSASSPRMLHRSTQTTNDGVCQSMCHDKYTKIFNDFKDRMKSDHKRETERVVREALEKLRSEMEEEKRQAVNKAVANMQGEMDRKCKQVKEKCKEEFVEEIKKLATQHKQLISQTKKKQWCYNCEEEAMYHCCWNTSYCSIKCQQEHWHAEHKRTCRRKR

SEQ ID NO: 1273 - protein, 549 aa, Homo sapiens
MLENYKNLATVGYQLFKPSLISWLEQEESRTVQRGDFQASEWKVQLKTKELALQQDVLGEPTSSGIQMIGSHNGGEVSDVKQCGDVSSEHSCLKTHVRTQNSENTFECYLYGVDFLTLHKKTSTGEQRSVFSQCGKAFSLNPDVVCQRTCTGEKAFDCSDSGKSFINHSHLQGHLRTHNGESLHEWKECGRGFIHSTDLAVRIQTHRSEKPYKCKECGKGFRYSAYLNIHMGTHTGDNPYECKECGKAFTRSCQLTQHRKTHTGEKPYKCKDCGRAFTVSSCLSQHMKIHVGEKPYECKECGIAFTRSSQLTEHLKTHTAKDPFECKICGKSFRNSSCLSDHFRIHTGIKPYKCKDCGKAFTQNSDLTKHARTHSGERPYECKECGKAFARSSRLSEHTRTHTGEKPFECVKCGKAFAISSNLSGHLRIHTGEKPFECLECGKAFTHSSSLNNHMRTHSAKKPFTCMECGKAFKFPTCVNLHMRIHTGEKPYKCKQCGKSFSYSNSFQLHERTHTGEKPYECKECGKAFSSSSSFRNHERRHADERLSA

SEQ ID NO: 1274 - DNA, 2757 bp, homo sapiens; identical to SEQ ID NO: 1

SEQ ID NO: 1275 - DNA, 2067 bp, homo sapiens
atggcggacctggaggctgtgctggccgatgtcagttacctgatggccatggagaagagcaaggcgaccccggccgcccgcgccagcaagaggatcgtcctgccggagcccagtatccggagtgtgatgcagaagtaccttgcagagagaaatgaaataacctttgacaagattttcaatcagaaaattggtttcttgctatttaaagatttttgtttgaatgaaattaatgaagctgtacctcaggtgaagttttatgaagagataaaggaatatgaaaaacttgataatgaggaagaccgcctttgcagaagtcgacaaatttatgatgcctacatcatgaaggaacttctttcctgttcacatcctttctcaaagcaagctgtagaacacgtacaaagtcatttatccaagaaacaagtgacatcaactctttttcagccatacatagaagaaatttgtgaaagccttcgaggtgacatttttcaaaaatttatggaaagtgacaagttcactagattttgtcagtggaaaaacgttgaattaaatatccatttgaccatgaatgagttcagtgtgcataggattattggacgaggaggattcggggaagtttatggttgcaggaaagcagacactggaaaaatgtatgcaatgaaatgcttagataagaagaggatcaaaatgaaacaaggagaaacattagccttaaatgaaagaatcatgttgtctcttgtcagcacaggagactgtcctttcattgtatgtatgacctatgccttccataccccagataaactctgcttcatcctggatctgatgaacgggggcgatttgcactaccacctttcacaacacggtgtgttctctgagaaggagatgcggttttatgccactgaaatcattctgggtctggaacacatgcacaatcggtttgttgtctacagagatttgaagccagcaaatattctcttggatgaacatggacacgcaagaatatcagatcttggtcttgcctgcgatttttccaaaaagaagcctcatgcgagtgttggcacccatgggtacatggctcccgaggtgctgcagaaggggacggcctatgacagcagtgccgactggttctccctgggctgcatgcttttcaaacttctgagaggtcacagccctttcagacaacataaaaccaaagacaagcatgaaattgaccgaatgacactcaccgtgaatgtggaacttccagacaccttctctcctgaactgaagtcccttttggagggcttgcttcagcgagacgttagcaagcggctgggctgtcacggaggcggctcacaggaagtaaaagagcacagctttttcaaaggtgttgactggcagcatgtctacttacaaaagtacccaccacccttgattcctccccggggagaagtcaatgctgctgatgcctttgatattggctcatttgatgaagaggataccaaagggattaagctacttgattgcgaccaagaactctacaagaacttccctttggtcatctctgaacgctggcagcaagaagtaacggaaacagtttatgaagcagtaaatgcagacacagataaaatcgaggccaggaagagagctaaaaataagcaacttggccacgaagaagattacgctctggggaaggactgtattatgcacgggtacatgctgaaactgggaaacccatttctgactcagtggcagcgtcgctatttttacctctttccaaatagacttgaatggagaggagagggagagtcccggcaaaatttactgacaatggaacagattctctctgtggaagaaactcaaattaaagacaaaaaatgcattttgttcagaataaaaggagggaaacaatttgtcttgcaatgtgagagtgatccagagtttgtgcagtggaagaaagagttgaacgaaaccttcaaggaggcccagcggctattgcgtcgtgccccgaagttcctcaacaaacctcggtcaggtactgtggagctcccaaagccatccctctgtcacagaaacagcaacggcctctag

SEQ ID NO: 1276 - DNA, 1455 bp, homo sapiens; identical to SEQ ID NO: 1016

SEQ ID NO: 1277 - DNA, 1041 bp, homo sapiens
atggcgcggaagtcgaacttgcctgtgcttctcgtgccgtttctgctctgccaggccctagtgcgctgctccagccctctgcccctggtcgtcaacacttggccctttaagaatgcaaccgaagcagcgtggagggcattagcatctggaggctctgccctggatgcagtggagagcggctgtgccatgtgtgagagagagcagtgtgacggctctgtaggctttggaggaagtcctgatgaacttggagaaaccacactagatgccatgatcatggatggcactactatggatgtaggagcagtaggagatctcagacgaattaaaaatgctattggtgtggcacggaaagtactggaacatacaacacacacacttttagtaggagagtcagccaccacatttgctcaaagtatggggtttatcaatgaagacttatctaccactgcttctcaagctcttcattcagattggcttgctcggaattgccagccaaattattggaggaatgttataccagatccctcaaaatactgcggaccctacaaaccacctggtatcttaaagcaggatattcctatccataaagaaacagaagatgatcgtggtcatgacactattggcatggttgtaatccataagacaggacatattgctgctggtacatctacaaatggtataaaattcaaaatacatggccgtgtaggagactcaccaatacctggagctggagcctatgctgacgatactgcaggggcagccgcagccactgggaatggtgatatattgatgcgcttcctgccaagctaccaagctgtagaatacatgagaagaggagaagatccaaccatagcttgccaaaaagtgatttcaagaatccagaagcattttccagaattctttggggctgttatatgtgccaatgtgactggaagttacggtgctgcttgcaataaactttcaacatttactcagtttagtttcatggtttataattccgaaaaaaatcagccaactgaggaaaaagtggactgcatctaa

SEQ ID NO: 1278 - DNA, 1095 bp, homo sapiens
atgctgctgtccctggtgctccacacgtactccatgcgctacctgctgcccagcgtcgtgctcctgggcacggcgcccacctacgtgttggcctggggggtctggcggctgctctccgccttcctgcccgcccgcttctaccaagcgctggacgaccggctctactgcgtctaccagagcatggtgctcttcttcttcgagaattacaccggggtccagatattgctatatggagatttgccaaaaaataaagaaaatataatatatttagcaaatcatcaaagcacagttgactggattgttgctgacatcttggccatcaggcagaatgcgctaggacatgtgcgctacgtgctgaaagaagggttaaaatggctgccattgtatgggtgttactttgctcagcatggaggaatctatgtaaagcgcagtgccaaatttaacgagaaagagatgcgaaacaagttgcagagctacgtggacgcaggaactccaatgtatcttgtgatttttccagaaggtacaaggtataatccagagcaaacaaaagtcctttcagctagtcaggcatttgctgcccaacgtggccttgcagtattaaaacatgtgctaacaccacgaataaaggcaactcacgttgcttttgattgcatgaagaattatttagatgcaatttatgatgttacggtggtttatgaagggaaagacgatggagggcagcgaagagagtcaccgaccatgacggaatttctctgcaaagaatgtccaaaaattcatattcacattgatcgtatcgacaaaaaagatgtcccagaagaacaagaacatatgagaagatggctgcatgaacgtttcgaaatcaaagataagatgcttatagaattttatgagtcaccagatccagaaagaagaaaaagatttcctgggaaaagtgttaattccaaattaagtatcaagaagactttaccatcaatgttgatcttaagtggtttgactgcaggcatgcttatgaccgatgctggaaggaagctgtatgtgaacacctggatatatggaaccctacttggctgcctgtgggttactattaaagcatag

SEQ ID NO: 1279 - DNA, 3006 bp, homo sapiens
atggctttaccgcagagtgaagatgcaatgaccggggacacagacaaatatcttgggccacaggaccttaaggaattgggtgatgattccctgcctgcagagggttacatgggctttagtctcggagcgcgttctgccagcctccgctccttcagttcggataggtcttacaccttgaacagaagctcctatgcacgggacagcatgatgattgaagaactccttgtgccatccaaagagcagcatctaacattcacaagggaatttgattcagattctcttagacattacagctgggctgcagacaccttagacaatgtcaatcttgtttcaagccccattcattctgggtttctggttagctttatggtggacgcgagagggggctccatgagaggaagccgtcatcacgggatgagaatcatcattcctccacgcaagtgtacggcccccactcgaatcacctgccgtttggtaaagagacataaactggccaacccaccccccatggtggaaggagagggattagccagtaggctggtagaaatgggtcctgcaggggcacaatttttaggccctgtcatagtggaaatccctcactttgggtccatgagaggaaaagagagagaactcattgttcttcgaagtgaaaatggtgaaacttggaaggagcatcagtttgacagcaaaaatgaagatttaaccgagttacttaatggcatggatgaagaacttgatagcccagaagagttagggaaaaagcgtatctgcaggattatcacgaaagatttcccccagtattttgcagtggtttcccggattaagcaggaaagcaaccagattggtcctgaaggtggaattctgagcagcaccacagtgccccttgttcaagcatctttcccagagggtgccctaactaaaagaattcgagtgggcctccaggcccagcctgttccagatgaaattgtgaaaaagatccttggaaacaaagcaacttttagcccaattgtcactgtggaaccaagaagacggaaattccataaaccaatcacaatgaccattccggtgcccccgccctcaggagaaggtgtatccaatggatacaaaggggacactacacccaatctgcgtcttctctgtagcattacagggggcacttcgcctgctcagtgggaagacatcacaggaacaactcctttgacgtttataaaagattgtgtctcctttacaaccaatgtttcagccagattttggcttgcagactgccatcaagttttagaaactgtggggttagccacgcaactgtacagagaattgatatgtgttccatatatggccaagtttgttgtttttgccaaaatgaatgatcccgtagaatcttccttgcgatgtttctgcatgacagatgacaaagtggacaaaactttagagcaacaagagaattttgaggaagtcgcaagaagcaaagatattgaggttctggaaggaaaacctatttatgttgattgttatggaaatttggccccacttaccaaaggaggacagcaacttgtttttaacttttattctttcaaagaaaatagactgccattttccatcaagattagagacaccagccaagagccctgtggtcgtctgtcttttctgaaagaaccaaagacaacaaaaggactgcctcaaacagcggtttgcaacttaaatatcactctgccagcacataaaaagattgagaaaacagatagacgacagagcttcgcatccttagctttacgtaagcgctacagctacttgactgagcctggaatgagtccacagagtccatgtgaacggacagatatcaggatggcaatagtagccgatcacctgggacttagttggacagaactggcaagggaactgaatttttcagtggatgaaatcaatcaaatacgtgtggaaaatccaaattctttaatttctcagagcttcatgttattaaaaaaatgggttaccagagacggaaaaaatgccacaactgatgccttaacttcggtcttgacaaaaattaatcgaatagatatagtgacactgctagaaggaccaatatttgattatggaaatatttcaggcaccagaagttttgcagatgagaacaatgttttccatgaccctgttgatggttatccttcccttcaagtggaactggaaacccccacagggttgcactacacaccacctacccctttccagcaagatgattattttagtgatatctctagcatagaatctccccttagaacccctagtagactgagtgatgggctagtgccttcccaggggaacatagagcattccgcagatggacctccagtcgtaactgcagaagacgcttccttagaagacagcaaactggaagactcagtgcctttaacagaaatgcctgaagcagtggatgtagatgagagccagttggagaatgtatgtctgagttggcagaatgagacatcaagtggaaacctagagtcctgcgctcaagctcgaagagtaactggtgggttactagatcgactggatgacagccctgaccagtgtagagattccattacctcatatctcaaaggagaagctggcaaatttgaagcaaatggaagccatacagaaatcactccagaagcaaagacaaaatcttactttccagaatcccaaaatgatgtaggaaaacagagtaccaaggaaactctgaaaccaaaaatacatggatctggtcatgttgaagaaccagcatcaccactagcagcatatcagaaatctctagaagaaaccagcaagcttataatagaagagactaaaccctgtgtgcctgtcagtatgaaaaagatgagtaggacttctccagcagatggcaagccaaggcttagcctccatgaagaagaggggtccagtgggtctgagcaaaagcagggagaaggttttaaggtgaaaacgaagaaagaaatccggcatgtggaaaagaagagccactcgtaa

SEQ ID NO: 1280 - DNA, 4506 bp, homo sapiens
atgatggcaaaaaacaaagagcctcgtcccccatcctataccatcagtatagttggactctctgggactgaaaaagacaaaggtaactgtggagttggaaagtcttgtttgtgcaatagatttgtacgctcaaaagcagatgaatattatccagagcatacttctgtgcttagcaccattgactttggaggacgagtagtaaacaatgatcactttttgtactggggtgacataatacaaaatagtgaagatggagtagaatgcaaaattcatgtcattgaacaaacagagttcattgatgaccagactttcttgcctcatcggagtacgaatttgcaaccatatataaaacgtgcagctgcatctaaattgcagtcagcagaaaaactaatgtacatttgcactgatcagctaggcttagaacaagactttgaacagaagcaaatgcctgaagggaagctcaacgtagatggatttttattatgcattgatgtaagtcaaggatgcaataggaagtttgatgatcaacttaaatttgtgaataacctttttgtccagttatcaaaatcaaaaaaacctgtaataatagcagcaactaaatgtgatgaatgcgtggatcattatcttagagaagttcaggcatttgcttcaaataaaaagaaccttcttgtagtggaaacatcagcacgatttaatgtcaacattgaaacatgttttactgcactggtacaaatgttggataaaactcgtagcaagcctaaaattattccctatttggatgcttataaaacacagagacaacttgttgtcacagcaacagataagtttgaaaaacttgtgcagactgtgagagattatcatgcaacttggaaaactgttagtaataaattaaaaaatcatcctgattatgaagaatacatcaacttagagggaacaagaaaggccagaaatacattctcaaaacatatagaacaacttaaacaggaacatataagaaaaaggagagaagagtatataaatactttaccaagagcttttaacactcttttgccaaatctagaagagattgaacatttgaattggtcagaagctttgaagttaatggaaaagagagcagatttccagttatgttttgtggtgctagaaaaaactccttgggatgaaactgaccatatagacaaaattaatgataggcggattccatttgacctcctgagcactttagaagctgaaaaagtctatcagaaccatgtacagcatctgatatccgagaagaggagggtggaaatgaaggaaaaattcaaaaagactttggaaaaaattcaattcatttcaccagggcagccatgggaggaagttatgtgctttgttatggaggatgaagcctacaaatatatcactgaggctgatagcaaagaggtatatggtaggcatcagcgagaaatagttgaaaaagccaaagaagagtttcaagaaatgctttttgagcattctgaacttttttatgatttagatcttaatgcaacacctagttcagataaaatgagtgaaattcatacagttctgagtgaagaacctagatataaagctttacagaaacttgcacctgatagggaatcccttctacttaagcatataggatttgtttatcatcccactaaagaaacatgtcttagtggccaaaattgtacagacattaaagtggagcagttacttgctagtagtcttttacagttggatcatggccgcttaagattatatcacgatagtaccaatatagataaagttaacctttttattttagggaaggatggccttgcccaagaactagcaaatgagataaggacacaatccactgatgatgagtatgccttagatggaaaaatttatgaacttgatcttcggccggttgatgccaaatcgccttactttttgagtcagttatggactgccgcctttaaaccacatgggtgcttctgtgtatttaattccattgagtcattgagttttattggggaatttattgggaaaataagaactgaagcttctcagatcagaaaagataaatacatggctaatcttccatttacattaattctggctaatcagagagattccattagtaagaatctaccaattctcaggcaccaagggcagcagttggcaaacaagttgcaatgtccttttgtagatgtacctgctggtacatatcctcgtaaatttaatgaaacccaaataaagcaagctctcagaggagtattggaatcagttaaacacaatttggatgtggtgagcccaattcctgccaataaggacttatcagaagctgacttgagaattgtcatgtgcgccatgtgtggagatccatttagtgtggatcttattctttcacccttccttgattctcattcttgcagtgctgctcaagctggacagaataattccctaatgcttgataaaatcattggtgaaaaaaggaggcgaatacagatcacaatattatcataccactcttcaattggagtaagaaaagatgaactagttcatgggtatatattagtttactctgcaaaacggaaagcttcgatgggaatgcttcgagcatttctatcagaagttcaagacaccattcctgtacagctggtggcagttactgacagccaagcagatttttttgaaaatgaggctatcaaagagttaatgactgaaggagaacacattgcaactgagatcactgctaaatttacagcactgtattctttatctcagtatcatcggcaaactgaggtctttactctgttttttagtgatgttctagagaaaaaaaatatgatagaaaattcttatttgtctgataatacaagggaatcaacccatcaaagtgaagatgtttttctaccatctcccagagactgttttccctataataactaccctgattcagatgatgacacagaagcaccacctccttatagtccaattggggatgatgtacagttgcttccaacacctagtgaccgttccagatatagattagatttggaaggaaatgagtatcctattcatagtaccccaaactgtcatgaccatgaacgcaaccataaagtgcctccacctattaaacctaaaccagttgtacctaagacaaatgtgaaaaaactcgatccaaaccttttaaaaacaattgaagctggtattggtaaaaatccaagaaagcagacttcccgggtgcctttggcacatcctgaagatatggatccttcagataactatgcggaacccattgatacaattttcaaacagaagggctattctgatgagatttatgttgtcccagatgatagtcaaaatcgtattaaaattcgaaactcatttgtaaataacacccaaggagatgaagaaaatgggttttctgatagaacctcaaaaagtcatggggaacggaggccttcaaaatacaaatataaatctaaaaccttgtttagtaaagccaagtcatactatagaagaacacattcagatgccagtgatgatgaggctttcaccacttctaaaacaaaaagaaaaggaagacatcgtggaagtgaagaagatccacttctttctcctgttgaaacttggaaaggtggtattgataatcctgcaatcacttctgaccaggagttagatgataagaagatgaagaagaaaacccacaaagtgaaagaagataaaaagaaaaagaaaactaagaacttcaatccaccaacacgtagaaattgggaaagtaattactttgggatgcccctccaggatctggttacagctgagaagcccataccactatttgttgagaaatgtgtggaatttattgaagatacagggttatgtaccgaaggactctaccgtgtcagcgggaataaaactgaccaagacaatattcaaaagcagtttgatcaagatcataatatcaatctagtgtcaatggaagtaacagtaaatgctgtagctggagcccttaaagctttctttgcagatctgccagatcctttaattccatattctcttcatccagaactattggaagcagcaaaaatcccggataaaacagaacgtcttcatgccttgaaagaaattgttaagaaatttcatcctgtaaactatgatgtattcagatacgtgataacacatctaaacagggttagtcagcaacataaaatcaacctaatgacagcagacaacttatccatctgtttttggccaaccttgatgagacctgattttgaaaatcgagagtttctgtctactactaagattcatcaatctgttgttgaaacattcattcagcagtgtcagtttttcttttacaatggagaaattgtagaaacgacaaacattgtggctcctccaccaccttcaaacccaggacagttggtggaaccaatggtgccacttcagttgccgccaccattgcaacctcagctgatacaaccacaattacaaacggatcctcttggtattatatga

SEQ ID NO: 1281 - DNA, 2331 bp, homo sapiens
atgaatccagaagaacaaatcgtgacatggcttatatctttgggagttttagagtcccctaaaaagaccatctgtgatccggaggagtttttaaagtcctcgctgaaaaatggggtagttctgtgcaaactgatcaacagactcatgcctggctctgtggaaaagttttgtctggatccccaaactgaagctgactgcatcaacaacatcaatgacttcctgaaaggatgtgcaaccctccaagtggaaatatttgatcctgatgacctttattcaggggtcaatttctccaaggtactgagtactcttttagctgtcaacaaagcaacagaagatcagctatcagaaagaccatgtggacgttcctcttctcttagtgctgctaatacttctcagacaaacccacagggagcagtttctagcacagtttcagggctgcaaaggcagtcaaagacagtggagatgacggaaaatggaagtcatcagttgatagtaaaagcaagattcaactttaagcagactaatgaggatgaactgtcagtttgtaagggggacatcatttacgtcacacgagttgaagaaggaggctggtgggaaggcacattaaatgggagaacaggctggttccccagtaattatgtccgtgaaattaaatccagtgagagacctctctccccaaaagccgtcaaaggatttgaaactgctccacttaccaagaattattatactgtggtgttacagaacatcctggacactgaaaaagaatatgctaaagaacttcagtctcttcttgttacttacttaagacccctgcagtccaataacaatctgagtactgtggaggttacatctttactgggaaacttcgaggaagtatgcacatttcaacagacactctgccaagccttggaagaatgttcaaagtttccagaaaaccagcacaaagtaggaggttgtctactgagtctcatgcctcattttaaatctatgtatctggcttactgtgcaaaccatccttcagctgtaaatgtgctcactcagcacagtgatgagttggaacaattcatggaaaatcaaggtgcatcgagcccaggtatcctcattttaacaacaaacctcagcaaaccattcatgcgactggagaaatatgttactctcttgcaagagttagaacggcatatggaggatactcatccagatcatcaggatattctgaaagcaatcgtagcattcaaaactctcatggggcaatgtcaagatctgaggaagagaaaacagctggagttacagatactgtccgaacctattcaggcatgggaaggagaagatattaaaaacttgggaaatgtgatttttatgtcacaagtaatggtgcagtatggagcatgtgaggaaaaagaggagcggtaccttatgttattttcaaatgtcctgataatgttatctgcaagtcctcggatgagtggctttatctatcagggaaaaataccaatagcaggaacggtggtgactagattagatgaaattgaagggaatgactgcacatttgaaatcactggtaacacagtggagagaattgtggtccattgtaacaacaaccaggacttccaggaatggttggagcagctgaacagactgatcagaggacctgcctcttgcagttcattatccaaaacctcatcgtcatcatgtagtgctcattcttcttttagctctaccggacagccccgaggacccttggagcctcctcaaattataaaaccgtggagtttaagttgtctacgacctgcacctccacttagaccatcagcagcactaggttataaagagaggatgtcttatatcttaaaggagtctagtaaaagccctaaaacgatgaagaaatttcttcataaaaggaagactgagagaaaaccatcggaggaggaatatgtgattaggaaaagtacagctgctctggaagaggatgctcaaatccttaaagtgatcgaagcctactgcaccagcgcaaattttcaacaaggccatggctcaagtactcgaaaagattccattccacaagtcctactccctgaggaagagaaactcatcattgaagaaaccagaagcaacggccagaccatcatggaagaaaagagccttgttgatactgtttacgccttgaaggacgaggtcagagaactgaagcaggaaaataaaagaatgaagcaatgcctggaagaagaactgaaatcaagaagggacctagaaaagctggtgcggaggcttttgaagcaaacagatgagtgtattcgaggcgagtccagtagcaagacctcaattcttccataa

SEQ ID NO: 1282 - DNA, 567 bp, homo sapiens
atggacgttaatatcgccccactccgcgcctgggacgatttcttcccgggttccgatcgctttgcccggccggacttcagggacatttccaaatggaacaaccgcgtagtgagcaacctgctctattaccagaccaactacctggtggtggctgccatgatgatttccattgtggggtttctgagtcccttcaacatgatcctgggaggaatcgtggtggtgctggtgttcacagggtttgtgtgggcagcccacaataaagacgtccttcgccggatgaagaagcgctaccccacgacgttcgttatggtggtcatgttggcgagctatttccttatctccatgtttggaggagtcatggtctttgtgtttggcattacttttcctttgctgttgatgtttatccatgcatcgttgagacttcggaacctcaagaacaaactggagaataaaatggaaggaataggtttgaagaggacaccgatgggcattgtcctggatgccctagaacagcaggaagaaggcatcaacagactcactgactatatcagcaaagtgaaggaataa

SEQ ID NO: 1283 - DNA, 6609 bp, homo sapiens
atggctttacctcgtctcacaggagccttgcgttccttttcaaatgtcaccaagcaagataattataatgaagaagtggctgacttaaagataaagcgatctaaacttcatgaacaagttttagatttgggcctgacatggaagaagataataaaatttttgaatgaaaaactggagaagagtaaaatgcaaagtataaatgaagacttaaaagatatattacatgctgcaaagcagatagttggaactgataatgggagagaagcaattgaaagtggggctgcatttctcttcatgacatttcacttgaaggactctgttggtcacaaggaaacaaaggctatcaaacagatgtttggcccctttccttcatcatctgccactgcagcttgtaatgctactaatcgaattatttctcattttagtcaagatgatcttactgctcttgtgcagatgacagaaaaagaacatggcgatagggttttttttggtaaaaatttagcattttcatttgacatgcatgatttggaccactttgacgaactgccaataaatggtgaaactcagaaaactataagcctagattataagaagtttctgaatgaacatctccaggaggcttgcaccccagaactcaagcctgtggaaaaaacaaatggctcctttttgtggtgtgaagttgaaaagtacctaaattcaactttgaaggaaatgactgaagtgccaagagtagaagatctttgctgtactttatatgatatgcttgcttctattaaaagtggtgatgaacttcaggatgagctatttgaactgctgggacctgaaggacttgaacttattgagaaactcctccagaacagaattacaattgtggatagatttcttaattcttcaaatgatcataggtttcaggctcttcaagacaattgtaaaaaaattttaggagaaaatgctaaacccaattatggttgtcaagtcactattcagtctgaacaagaaaagcagttaatgaaacaatatcgacgtgaagaaaaaagaattgccagacgagaaaaaaaggctggagaagatttagaagtttcagaaggacttatgtgctttgatcctaaggaattgcggatacaaagagaacaggcacttctgaatgctagaagtgttccaattctgagcaggcagagagatgcagacgttgaaaaaatacattatccccatgtgtatgattcccaggctgaagccatgaaaacatcagcatttattgctggtgcaaagatgattttgccagaaggaatccaaagagagaataacaagctttatgaagaagtaaggattccctacagcgaaccaatgccactcagctttgaggaaaagccagtttatatccaagacttagatgagatcggacagctggcttttaaaggaatgaagagactcaatagaatccagtcaatagtgtttgagactgcctacaacaccaatgagaacatgctgatttgtgcccctacaggagctggaaaaaccaacattgcaatgctgacagtcttgcatgaaattcgccaacattttcaacaaggtgttatcaaaaagaatgaatttaagattgtatatgttgctccaatgaaagccttggcagctgaaatgacagattacttcagcagacgtctagagccactaggcatcattgtgaaagaattgactggtgacatgcagttgtccaaaagtgaaattttacgaactcagatgcttgtgaccacaccagaaaaatgggatgtagtgacaagaaagagtgttggggatgtagctctttcccagattgtaaggctccttattcttgatgaagttcatttgctgcatgaagatagaggaccagtattagaaagcatagttgcccgtactttacggcaggtggaatccacacagagtatgataaggattctcggactgtctgcaactttacctaactacctcgatgttgccacatttttacatgttaatccatacattggacttttcttctttgatggccgttttcgaccagtacctcttggacagacatttttggggattaaatgtgcaaataagatgcagcagttgaataacatggatgaagtatgttatgaaaatgttttgaagcaagtaaaggctggacaccaggtgatggtgtttgtacatgctcgaaatgccactgtaagaacagctatgtctctaatagaaagagcaaaaaattgtggccatattcccttcttttttcctacccaaggacatgactatgtacttgcagaaaaacaggtacaaaggtcgagaaataagcaagtacgagaattattcccagatggttttagtattcatcatgcaggaatgcttcggcaggacagaaatttagttgaaaacttgttttctaatgggcatatcaaagtcctagtgtgtacagctacgttagcctggggtgtcaatcttcccgcccatgctgttattattaagggaacacaaatatatgctgcaaaaagaggctcctttgttgaccttggaattttagatgtcatgcagatatttggtcgagctggacgaccacaatttgacaaatttggggaaggaataattataacaacgcatgataaactcagccattacctcactttgctcactcaacgaaacccaattgagagtcagtttctggaaagccttgcagataacctaaatgcagagattgctctgggaacagttactaatgtggaagaagcagtgaagtggataagttacacttatctttatgtacggatgagagcaaatccattagcatatggcatcagtcacaaggcttatcagattgacccaacattaagaaagcatcgagaacagttggtcattgaagttggacgaaaactagacaaagctcagatgattcgttttgaggagcgaactggatatttttcctcaactgatttgggtagaactgccagccattactatattaaatacaacaccattgagacctttaatgaactctttgatgctcacaaaacagaaggtgatatctttgccatagtctccaaagctgaagaatttgatcaaattaaggtcagagaagaggaaatagaggagttagataccttattaagcaatttttgtgaactctccactcctggaggtgtagagaatagttatgggaaaataaacatcttacttcaaacttatatcagccgaggagaaatggacagtttctcccttatatcagattctgcatatgttgcacagaatgcagctagaattgtccgtgctctttttgaaattgctctgaggaaacgttggcctaccatgacctacaggctcctgaatcttagtaaagtcattgacaagaggctttggggttgggctagccctttgagacaattttcaatcctaccaccacacatcctaacaagattagaagaaaaaaagcttactgtggataagctgaaagacatgaggaaagatgaaataggtcacattttacatcatgtgaatattggactgaaggtcaaacaatgtgttcatcagattccttctgttatgatggaagcatccattcagcctatcacaaggactgtcctccgagtgacactcagcatctatgctgatttcacttggaatgatcaggtacatgggacagtaggagaaccttggtggatttgggtagaagatcctacaaatgatcatatttatcattcagagtattttctagctctaaaaaaacaagtcattagtaaagaagcccaactactggtatttacaatccctatttttgagcctttgccttcccaatactacatccgagcagtgtctgatagatggttgggtgctgaggcagtatgtattatcaactttcaacatctaattctaccagagagacatcctcctcatacagaattactggatcttcagcctttaccaatcacagctttgggatgtaaagcatatgaagccctgtacaacttcagccactttaaccctgtacagacacaaatatttcatacattgtatcacacggattgtaatgtcctacttggagcacctactggatcgggaaagactgttgcagctgaattagccattttcagagtcttcaacaaataccctacttcaaaggcggtatatattgcacccctaaaagccctagtacgtgaaagaatggatgattggaaagttagaatagaagaaaaacttggtaaaaaagttattgaactaacaggggatgtgactcctgatatgaaatccattgccaaggctgaccttatcgtcactacgccagagaagtgggatggagtcagcagaagctggcaaaataggaactatgttcagcaagtcactattctcatcatagatgagatccatctgcttggggaggaaagaggccctgttctagaggtcattgtatctcgaacaaattttatctcatcacacacagaaaagcctgttagaatagttggactatctactgcattagctaatgccagagaccttgctgattggctcaatattaagcagatgggcttgtttaacttccgaccatcagtacgcccagttccactggaagttcacattcaaggctttccaggtcaacattactgtcctcgtatggctagtatgaacaagcctgcatttcaggcaattagaagccattctccagccaaacctgttttgatatttgtctcatcaagacgtcaaactcgtcttactgctttggaattgatcgccttcctggctactgaagaagatccaaagcagtggttaaacatggatgaaagagagatggagaacatcattgcaacagtaagagattccaacctcaagctgacccttgctttcgggataggaatgcatcatgctggactacatgagagggaccgaaaaacagtagaggaactatttgtaaactgtaaagttcaggttcttattgctacaagcacattagcctggggtgtaaactttccagctcatttagtaattattaagggaacagaatactatgatggaaaaacaagacgttatgtggattttcccattacagatgtcctccagatgatggggcgtgctgggaggccgcagttcgatgaccaaggcaaagctgtaattctagttcatgacataaagaaagacttttataaaaaatttctttatgaacctttcccagtagaatcaagtttattaggagtgctctctgaccacttaaatgcagagattgctggtggtacaattacatctaagcaagatgcattggattatatcacctggacttactttttccgacgtcttatcatgaatcccagctattacaatttgggtgatgtgagccatgattctgtgaacaagtttctgtcccatctgattgagaagtccctgattgaattggaactttcctactgtattgaaattggagaggataatcgcagcattgaacctctaacttatggccgaattgcctcctattactatttgaagcatcaaacagttaaaatgttcaaggaccgcttgaagcctgaatgcagtactgaagaactgctttcaattctaagtgatgcagaagaatatacagatttgccagtgagacacaatgaagatcatatgaatagtgaactggcaaaatgtcttcccattgaatcaaatcctcattcatttgacagccctcacaccaaagcacatctcctgctacaggcacatctcagccgagccatgctaccctgcccagattatgacactgataccaaaacagtcttggaccaagctctcagagtatgtcaggcaatgctggacgtggctgcaaaccagggctggctggtgactgtcctgaatatcaccaacctgattcagatggtgatccagggtcggtggttaaaggactcttctcttcttacactaccaaacatagaaaaccatcatcttcaccttttcaagaaatggaagccgattatgaagggcccacatgctaggggtcggacctccatcgagtcccttcctgaactgatccatgcctgtggagggaaagaccatgtatttagctccatggtagaaagtgagctacatgctgcaaaaacgaaacaggcatggaatttcttatctcacttgccagtgataaatgttggcataagtgttaaaggctcgtgggatgacttagttgaaggacataatgaactctctgtctcaactctgactgcagacaaacgagatgacaacaaatggatcaaattgcatgctgaccaagagtatgtgcttcaagtgagcttgcagagagtccactttgggttccacaagggaaagccagagagctgtgcagttactcctcgatttcccaaatcaaaagacgaaggatggtttttgatattaggagaagtggataagagagaacttattgctttgaaaagagtaggatatattcgaaatcatcatgttgcttccctttctttttatacccctgaaatacctggaaggtatatctacacattatatttcatgagtgactgctaccttggcctggaccagcagtatgacatctatctcaacgttacacaagcgagtctttctgcacaggtcaacaccaaggtctctgattccctgactgacctggcattaaagtaa

SEQ ID NO: 1284 - DNA, 3495 bp, homo sapiens
atgcccaccatgcggaggaccgtgtcggagatccgctcgcgcgccgaaggttatgagaagacagatgatgtttcagagaagacctcactggctgaccaggaggaagtaaggactattttcatcaaccagccccagctgacaaaattctgcaataaccatgtcagcactgcaaaatacaacataatcacattccttccaagatttctctactctcagttcagaagagctgctaattcattttttctctttattgcactgctgcagcaaatacctgatgtgtcaccaacaggtcgttatacaacactggttcctctcttatttattttagctgtggcagctatcaaagagataatagaagatattaaacgacataaagctgataatgcagtgaacaagaaacaaacgcaagttttgagaaatggtgcttgggaaattgtccactgggaaaaggtggcagtaggggagatagtgaaagtgaccaatggggaacatctcccagcagatctcatcagtctgtcctcaagtgagccccaagccatgtgctacattgaaacatccaacttagatggtgaaacaaacttgaaaattagacagggcttaccagcaacatcagatatcaaagacgttgacagtttgatgaggatttctggcagaattgagtgtgaaagtccaaacagacatctctacgattttgttggaaacataaggcttgatggacatggcaccgttccactgggagcagatcagattcttcttcgaggagctcagttgagaaatacacagtgggttcatggaatagttgtctacactggacatgacaccaagctgatgcagaattcaacaagtccaccacttaagctctcaaatgtggaacggattacaaatgtacaaattttgattttattttgtatcttaattgccatgtctcttgtctgttctgtgggctcagccatttggaatcgaaggcattctggaaaagactggtatctcaatctaaactatggtggcgctagtaattttggactgaatttcttgaccttcatcatccttttcaacaatctcattcctatcagcttattggttacattagaagttgtgaaatttacccaggcatacttcataaattgggatcttgacatgcactatgaacccacagacactgctgctatggctcgaacatctaatctgaatgaggaacttggccaggttaaatacatattttctgacaaaactggtactctgacatgcaatgtaatgcagtttaagaagtgcaccatagcgggagttgcttatggccatgtccctgaacctgaggattatggctgctctcctgatgaatggcagaactcacagtttggagatgaaaaaacatttagtgattcatcattgctggaaaatctccaaaataatcatccaactgcacctataatatgtgaatttcttacaatgatggcagtctgtcacacagcagtgccagagcgagaaggtgacaagattatttatcaagcagcatctccagatgagggagcattggtcagagcagccaagcaattgaattttgttttcactggaagaacacccgactcggtgattatagattcactggggcaggaagaaagatatgaattgctcaatgtcttggagtttaccagtgctaggaaaagaatgtcagtgattgttcgcactccatctggaaagttacgactctactgcaaaggagctgacactgtaatttatgatcgactggcagagacgtcaaaatacaaagaaattaccctaaaacatttagagcagtttgctacagaagggttaagaactttatgttttgctgtggctgagatttcagagagcgactttcaggagtggcgagcagtctatcagcgagcatctacatctgtgcagaacaggctactcaaactcgaagagagttatgagttgattgaaaagaatcttcagctacttggagcaacagccattgaggataaattacaagatcaagtgcctgaaaccatagaaacgctaatgaaagcagacatcaaaatctggatccttacaggggacaagcaagaaactgccattaacatcggacactcctgcaaactgttgaagaagaacatgggaatgattgttataaatgaaggctctcttgatggaacaagggaaactctcagtcgtcactgtactacccttggtgatgctctccggaaagagaatgattttgctcttataattgatgggaaaaccctcaaatatgccttaacctttggagtacgacagtatttcctggacttagctttgtcatgcaaagctgtcatttgctgtcgggtttctcctcttcaaaaatctgaagttgttgagatggttaagaaacaagtcaaagtcgtaacgcttgcaatcggtgatggagcaaatgatgtcagcatgatacagacagcgcacgttggtgttggtatcagtggcaatgaaggcctgcaggcagctaattcctctgactactccatagctcagttcaaatatttgaagaatttactgatgattcatggtgcctggaactataacagagtctccaagtgcatcttatactgcttctacaagaatatagtgctctatattatcgagatctggtttgcctttgttaatggcttttctggacagatcctctttgaaagatggtgtataggtctctataacgtgatgtttacagcaatgcctcctttaactcttggaatatttgagagatcatgcagaaaagagaacatgttgaagtaccctgaattatacaaaacatctcagaatgccctggacttcaacaccaaggttttctgggttcattgtttaaatggcctcttccactcagttattctgttttggtttccactaaaagcccttcagtatggtactgcatttggaaatgggaaaacctcggattatctgctactgggaaactttgtgtacacttttgtggtgataactgtgtgtttgaaagctggattggagacatcatattggacatggttcagccacatagcgatatgggggagcatcgcactctgggtggtgttttttggaatctactcatctctgtggcctgccattccgatggcccctgatatgtcaggagaggcagccatgttgttcagttctggagtcttttggatgggcttgttattcatccctgtggcatctctgctccttgatgtggtgtacaaggttatcaagaggactgcttttaaaacattggtcgatgaagttcaggagctggaggcaaaatctcaagacccaggagcagttgtacttggaaaaagcctgaccgagagggcgcaactgctcaagaacgtctttaagaagaaccacgtgaacttgtaccgctctgaatccttgcaacaaaatctgctccatgggtatgcgttctctcaagatgaaaatggaatcgtttcacagtctgaagtgataagagcatatgataccacgaaacagaggcccgacgaatggtga

SEQ ID NO: 1285 - DNA, 1086 bp, homo sapiens
atggagtccatcttccacgagaaacaagaaggctcactttgtgctcaacattgcctgaataacttattgcaaggagaatattttagccctgtggaattatcctcaattgcacatcagctggatgaggaggagaggatgagaatggcagaaggaggagttactagtgaagattatcgcacgtttttacagcagccttctggaaatatggatgacagtggttttttctctattcaggttataagcaatgccttgaaagtttggggtttagaactaatcctgttcaacagtccagagtatcagaggctcaggatcgatcctataaatgaaagatcatttatatgcaattataaggaacactggtttacagttagaaaattaggaaaacagtggtttaacttgaattctctcttgacgggtccagaattaatatcagatacatatcttgcacttttcttggctcaattacaacaggaaggttattctatatttgtcgttaagggtgatctgccagattgcgaagctgaccaactcctgcagatgattagggtccaacagatgcatcgaccaaaacttattggagaagaattagcacaactaaaagagcaaagagtccataaaacagacctggaacgagtgttagaagcaaatgatggctcaggaatgttagacgaagatgaggaggatttgcagagggctctggcactaagtcgccaagaaattgacatggaagatgaggaagcagatctccgcagggctattcagctaagtatgcaaggtagttccagaaacatatctcaagatatgacacagacatcaggtacaaatcttacttcagaagagcttcggaagagacgagaagcctactttgaaaaacagcagcaaaagcagcaacagcagcagcagcagcagcagcagggggacctatcaggacagagttcacatccatgtgaaaggccagccaccagttcaggagcacttgggagtgatctaggtgatgctatgagtgaagaagacatgcttcaggcagctgtgaccatgtctttagaaactgtcagaaatgatttgaaaacagaaggaaaaaaataa

SEQ ID NO: 1286 - DNA, 1179 bp, homo sapiens
atggcggttgtagcggcggctgccggctggctactcaggctcagggcggcaggggctgaggggcactggcgtcggcttcctggcgcggggctggcgcggggctttttgcaccccgccgcgactgtcgaggatgcggcccagaggcggcaggtggctcattttactttccagccagatccggagccccgggagtacgggcaaactcagaaaatgaatcttttccagtctgtaacaagtgccttggataactcattggccaaagatcctactgcagtaatatttggtgaagatgttgcctttggtggagtctttagatgcactgttggcttgcgagacaaatatggaaaagatagagtttttaataccccattgtgtgaacaaggaattgttggatttggaatcggaattgcggtcactggagctactgccattgcggaaattcagtttgcagattatattttccctgcatttgatcagattgttaatgaagctgccaagtatcgctatcgctctggggatctttttaactgtggaagcctcactatccggtccccttggggctgtgttggtcatggggctctctatcattctcagagtcctgaagcattttttgcccattgcccaggaatcaaggtggttatacccagaagccctttccaggccaaaggacttcttttgtcatgcatagaggataaaaatccttgtatattttttgaacctaaaatactttacagggcagcagcggaagaagtccctatagaaccatacaacatcccactgtcccaggccgaagtcatacaggaagggagtgatgttactctagttgcctggggcactcaggttcatgtgatccgagaggtagcttccatggcaaaagaaaagcttggagtgtcttgtgaagtcattgatctgaggactataataccttgggatgtggacacaatttgtaagtctgtgatcaaaacagggcgactgctaatcagtcacgaggctcccttgacaggcggctttgcatcggaaatcagctctacagttcaggaggaatgtttcttgaacctagaggctcctatatcaagagtatgtggttatgacacaccatttcctcacatttttgaaccattctacatcccagacaaatggaagtgttatgatgcccttcgaaaaatgatcaactattga

SEQ ID NO: 1287 - DNA, 951 bp, homo sapiens
atggcggtgcaggtggtgcaggcggtgcaggcggttcatctcgagtctgacgctttcctcgtttgtctcaaccacgctctgagcacagagaaggaggaagtaatggggctgtgcataggggagttgaacgatgatacaaggagtgactccaaatttgcatatactggaactgaaatgcgcacagttgctgaaaaggttgatgccgtcagaattgttcacattcattctgtcatcatcttacgacgttctgataagaggaaggaccgagtagaaatttctccagagcagctgtctgcagcttcaacagaggcagagaggttggctgaactgacaggccgccccatgagagttgtgggctggtatcattcccatcctcatataactgtttggccttcacatgttgatgttcgcacacaagccatgtaccagatgatggatcaaggctttgtaggacttattttttcctgtttcatagaagataagaacacaaagactggccgggtactctacacttgcttccaatccatacaggcccaaaagagttcagagtcccttcatggtccacgagacttctggagctccagccagcacatctccattgagggccagaaggaagaggaaaggtatgagagaatcgaaatcccaatccatattgtacctcatgtcactatcgggaaagtgtgccttgaatcagcagtagagctgcccaagatcctgtgccaggaggagcaggatgcgtataggaggatccacagccttacacatctggactcagtaaccaagatccataatggctcagtgtttaccaagaatctgtgcagtcagatgtcggcagtcagcgggcctctcctacagtggttggaggacagactggagcaaaaccaacagcatttgcaggaattacaacaagaaaaggaagagcttatgcaagaactttcttctctagaataa

SEQ ID NO: 1288 - DNA, 1584 bp, homo sapiens
atggaatcagctgctgccctgcacttctcccggccagcctccctcctcctcctcctcctcagcctgtgtgcactggtctcagcccagtttattgtcgtggggcccactgatcccatcttggccacggttggagaaaacactacgttacgctgccatctgtcacccgagaaaaatgctgaggacatggaggtgcggtggttccggtctcagttctcccccgcagtgtttgtgtataaaggtggcagagagagaacagaggagcagatggaggagtaccgaggaagaaccacctttgtgagcaaagacatcagcaggggcagcgtggccctggtcatacacaacatcacagcccaggaaaacggcacctaccgctgttacttccaagaaggcaggtcctacgatgaggccatcctgcacctcgtagtggcaggactaggctctaagcccctcatttcaatgaggggccatgaagacgggggcatccggctggagtgcatatctagagggtggtacccaaagcccctcacagtgtggagggacccctacggtggggttgcgcctgccctgaaagaggtctccatgcctgatgcagacggcctcttcatggtcaccacggctgtgatcatcagagacaagtctgtgaggaacatgtcctgctctatcaacaacaccctgctcggccagaagaaagaaagtgtcatttttattccagaatcctttatgcccagtgtgtctccctgtgcagtggccctgcctatcattgtggttattctgatgatacccattgccgtatgcatctattggatcaacaaactccaaaaggaaaaaaagattctgtcaggggaaaaggagtttgaacgggaaacaagagaaattgctctaaaggaactggagaaagaacgtgtgcaaaaagaggaagaacttcaagtaaaagagaaacttcaagaagaattgcgatggagaagaacattcttacatgctgttgatgtggtcctggatccagacaccgctcatcccgatctcttcctgtcagaggaccggagaagtgtgagaaggtgccccttcaggcacctaggggagagcgtgcctgacaacccagagagattcgacagtcagccttgtgtcctaggccgggagagcttcgcttcagggaaacattactgggaggtggaggtggaaaacgtgattgagtggactgtgggggtctgtagagacagtgttgagaggaaaggggaggtcctgctgattcctcagaatggcttctggaccttggagatgcataaagggcaataccgggccgtgtcctcccctgataggattctccctttgaaggagtccctttgccgggtgggcgtcttcctggactatgaagctggagatgtctccttctacaacatgagggacagatcgcacatctacacatgtccccgttcagccttttccgtgcctgtgaggcccttcttcaggttggggtgtgaggacagccccatcttcatctgccctgcactcacaggagccaatggggtcacggtgcctgaagagggcctgacacttcacagagtggggacccaccagagcctatag

SEQ ID NO: 1289 - DNA, 1260 bp, homo sapiens
atgaataagcatcagaagccagtgctaacaggccagcggttcaaaactcggaaaagggatgaaaaagagaaattcgaacccacagtcttcagggatacacttgtccaggggcttaatgaggctggtgatgaccttgaagctgtagccaaatttctggactctacaggctcaagattagattatcgtcgctatgcagacacactcttcgatatcctggtggctggcagtatgcttgcccctggaggaacgcgcatagatgatggtgacaagaccaagatgaccaaccactgtgtgttttcagcaaatgaagatcatgaaaccatccgaaactatgctcaggtcttcaataaactcatcaggagatataagtatttggagaaggcatttgaagatgaaatgaaaaagcttctcctcttccttaaagccttttccgaaacagagcagacaaagttggcgatgctgtcggggattctgctgggcaatggcaccctgcccgccaccatcctcaccagtctcttcaccgacagcttagtcaaagaaggcattgcggcctcatttgctgtcaagcttttcaaagcatggatggcagaaaaagatgccaactctgttacctcgtctttgagaaaagccaacttagacaagaggctgcttgaactctttccagttaacagacagagtgtggatcattttgctaaatacttcactgacgcaggtcttaaggagctttccgacttcctccgagtccagcagtccctgggcaccaggaaggaactgcagaaggagctccaggagcgtctttctcaggaatgcccgatcaaggaggtggtgctttatgtcaaagaagaaatgaagaggaatgatcttccagaaacagcagtgattggtcttctgtggacatgtataatgaacgctgttgagtggaacaagaaggaagaacttgttgcagagcaggctctgaagcacctgaagcaatatgctcccctgctggccgtgttcagctcccaaggccagtcagagctgatcctcctccagaaggttcaggaatactgctacgacaacatccatttcatgaaagcctttcagaagattgtggttctcttttataaagctgatgttctgagcgaagaagcaatactgaaatggtataaggaagcacatgttgctaaaggcaaaagtgtttttcttgaccagatgaagaaatttgttgagtggttacaaaatgcagaagaagaatccgaatcggaaggtgaggaaaattaa

SEQ ID NO: 1290 - DNA, 423 bp, homo sapiens
atgagccgtttcctgaatgtgttaagaagttggctggttatggtgtccatcatagccatggggaacacgctgcagagcttccgagaccacacttttctctatgaaaagctctacactggcaagccaaaccttgtgaatggcctccaagctcggacctttgggatctggacgctgctctcatcagtgattcgctgcctctgtgccattgacattcacaacaagacgctctatcacatcacactctggaccttcctccttgccctggggcatttcctctctgagttgtttgtctatggaactgcagctcccacgattggcgtcctggcacccctgatggtggcaagtttctccatcctgggtatgctggtcgggctccggtatctagaagtagaaccagtatccagacagaagaagagaaactga

SEQ ID NO: 1291 - DNA, 663 bp, homo sapiens
atgctcaggctgctcttggctctcaacttattcccttcaattcaagtaacaggaaacaagattttggtgaagcagtcgcccatgcttgtagcgtacgacaatgcggtcaaccttagctgcaagtattcctacaatctcttctcaagggagttccgggcatcccttcacaaaggactggatagtgctgtggaagtctgtgttgtatatgggaattactcccagcagcttcaggtttactcaaaaacggggttcaactgtgatgggaaattgggcaatgaatcagtgacattctacctccagaatttgtatgttaaccaaacagatatttacttctgcaaaattgaagttatgtatcctcctccttacctagacaatgagaagagcaatggaaccattatccatgtgaaagggaaacacctttgtccaagtcccctatttcccggaccttctaagcccttttgggtgctggtggtggttggtggagtcctggcttgctatagcttgctagtaacagtggcctttattattttctgggtgaggagtaagaggagcaggctcctgcacagtgactacatgaacatgactccccgccgccccgggcccacccgcaagcattaccagccctatgccccaccacgcgacttcgcagcctatcgctcctga

SEQ ID NO: 1292 - DNA, 786 bp, homo sapiens
atgatcgaaacatacaaccaaacttctccccgatctgcggccactggactgcccatcagcatgaaaatttttatgtatttacttactgtttttcttatcacccagatgattgggtcagcactttttgctgtgtatcttcatagaaggttggacaagatagaagatgaaaggaatcttcatgaagattttgtattcatgaaaacgatacagagatgcaacacaggagaaagatccttatccttactgaactgtgaggagattaaaagccagtttgaaggctttgtgaaggatataatgttaaacaaagaggagacgaagaaagaaaacagctttgaaatgcaaaaaggtgatcagaatcctcaaattgcggcacatgtcataagtgaggccagcagtaaaacaacatctgtgttacagtgggctgaaaaaggatactacaccatgagcaacaacttggtaaccctggaaaatgggaaacagctgaccgttaaaagacaaggactctattatatctatgcccaagtcaccttctgttccaatcgggaagcttcgagtcaagctccatttatagccagcctctgcctaaagtcccccggtagattcgagagaatcttactcagagctgcaaatacccacagttccgccaaaccttgcgggcaacaatccattcacttgggaggagtatttgaattgcaaccaggtgcttcggtgtttgtcaatgtgactgatccaagccaagtgagccatggcactggcttcacgtcctttggcttactcaaactctga

SEQ ID NO: 1293 - DNA, 987 bp, homo sapiens
atggctcagcaccacctatggatcttgctcctttgcctgcaaacctggccggaagcagctggaaaagactcagaaatcttcacagtgaatgggattctgggagagtcagtcactttccctgtaaatatccaagaaccacggcaagttaaaatcattgcttggacttctaaaacatctgttgcttatgtaacaccaggagactcagaaacagcacccgtagttactgtgacccacagaaattattatgaacggatacatgccttaggtccgaactacaatctggtcattagcgatctgaggatggaagacgcaggagactacaaagcagacataaatacacaggctgatccctacaccaccaccaagcgctacaacctgcaaatctatcgtcggcttgggaaaccaaaaattacacagagtttaatggcatctgtgaacagcacctgtaatgtcacactgacatgctctgtagagaaagaagaaaagaatgtgacatacaattggagtcccctgggagaagagggtaatgtccttcaaatcttccagactcctgaggaccaagagctgacttacacgtgtacagcccagaaccctgtcagcaacaattctgactccatctctgcccggcagctctgtgcagacatcgcaatgggcttccgtactcaccacaccgggttgctgagcgtgctggctatgttctttctgcttgttctcattctgtcttcagtgtttttgttccgtttgttcaagagaagacaagatgctgcctcaaagaaaaccatatacacatatatcatggcttcaaggaacacccagccagcagagtccagaatctatgatgaaatcctgcagtccaaggtgcttccctccaaggaagagccagtgaacacagtttattccgaagtgcagtttgctgataagatggggaaagccagcacacaggacagtaaacctcctgggacttcaagctatgaaattgtgatctag

SEQ ID NO: 1294 - DNA, 441 bp, homo sapiens
atggcccagaagcgtcctgcctgcaccctgaagcctgagtgtgtccagcagctgctggtttgctcccaggaggccaagaagtcagcctactgcccctacagtcactttcctgtgggggctgccctgctcacccaggaggggagaatcttcaaagggtgcaacatagaaaatgcctgctacccgctgggcatctgtgctgaacggaccgctatccagaaggccgtctcagaagggtacaaggatttcagggcaattgctatcgccagtgacatgcaagatgattttatctctccatgtggggcctgcaggcaagtcatgagagagtttggcaccaactggcccgtgtacatgaccaagccggatggtacgtatattgtcatgacggtccaggagctgctgccctcctcctttgggcctgaggacctgcagaagacccagtga

SEQ ID NO: 1295 - DNA, 981 bp, homo sapiens
atggagaaggacggcctgtgccgcgctgaccagcagtacgaatgcgtggcggagatcggggagggcgcctatgggaaggtgttcaaggcccgcgacttgaagaacggaggccgtttcgtggcgttgaagcgcgtgcgggtgcagaccggcgaggagggcatgccgctctccaccatccgcgaggtggcggtgctgaggcacctggagaccttcgagcaccccaacgtggtcaggttgtttgatgtgtgcacagtgtcacgaacagacagagaaaccaaactaactttagtgtttgaacatgtcgatcaagacttgaccacttacttggataaagttccagagcctggagtgcccactgaaaccataaaggatatgatgtttcagcttctccgaggtctggactttcttcattcacaccgagtagtgcatcgcgatctaaaaccacagaacattctggtgaccagcagcggacaaataaaactcgctgacttcggccttgcccgcatctatagtttccagatggctctaacctcagtggtcgtcacgctgtggtacagagcacccgaagtcttgctccagtccagctacgccacccccgtggatctctggagtgttggctgcatatttgcagaaatgtttcgtagaaagcctctttttcgtggaagttcagatgttgatcaactaggaaaaatcttggacgtgattggactcccaggagaagaagactggcctagagatgttgcccttcccaggcaggcttttcattcaaaatctgcccaaccaattgagaagtttgtaacagatatcgatgaactaggcaaagacctacttctgaagtgtttgacatttaacccagccaaaagaatatctgcctacagtgccctgtctcacccatacttccaggacctggaaaggtgcaaagaaaacctggattcccacctgccgcccagccagaacacctcggagctgaatacagcctga

SEQ ID NO: 1296 - DNA, 597 bp, homo sapiens
atgtcaaacgtgcgagtgtctaacgggagccctagcctggagcggatggacgccaggcaggcggagcaccccaagccctcggcctgcaggaacctcttcggcccggtggaccacgaagagttaacccgggacttggagaagcactgcagagacatggaagaggcgagccagcgcaagtggaatttcgattttcagaatcacaaacccctagagggcaagtacgagtggcaagaggtggagaagggcagcttgcccgagttctactacagacccccgcggccccccaaaggtgcctgcaaggtgccggcgcaggagagccaggatgtcagcgggagccgcccggcggcgcctttaattggggctccggctaactctgaggacacgcatttggtggacccaaagactgatccgtcggacagccagacggggttagcggagcaatgcgcaggaataaggaagcgacctgcaaccgacgattcttctactcaaaacaaaagagccaacagaacagaagaaaatgtttcagacggttccccaaatgccggttctgtggagcagacgcccaagaagcctggcctcagaagacgtcaaacgtaa

SEQ ID NO: 1297 - DNA, 2049 bp, homo sapiens
atgagcacaccggccgtgccccaggacctgcagctgcccccgagtcagagggcgcagtccgcattcaaagagcaaagaagacaaaaactcaaggaacatctgttgagaagaaaaacgctttttgcatacaagcaggaaaatgagatgttatccagtagagatcagagagttgtgacatctgaggaccaagttcaagaagggactaaagtgctgaaacttaaaacaaaaatggctgataaagaaaacatgaagagacctgcagagagcaaaaataatacagtggtggggaaacattgtattcctttaaaaccttcaaatgaactaaccaattcaactgtagtaattgacacacataaacctaaggatagtaatcaaactccgcatttgttactaactgaagatgatccccaaagtcaacatatgacattaagccaggcatttcaccttaaaaacaatagtaaaaagaaacaaatgactacagaaaaacaaaagcaagatgctaacatgcccaagaaacctgtgcttggatcttatcgtggccagattgttcagtctaagattaattcatttagaaaacctctacaagtcaaagatgagagttctgcagcaacaaagaaactttcagccactatacctaaagccacaaaacctcagcctgtaaacaccagcagtgtaacagtgaaaagtaatagatcctccaatatgactgccactactaaatttgtgagcactacatctcagaacacacaacttgtgcgacctcctattagaagtcatcacagtaatacccgggacactgtgaaacaaggcatcagtagaacttctgccaatgttacaatccggaaagggcctcatgaaaaagaactattacaatcaaaaacagctttatctagtgtcaaaaccagttcttctcaaggtataataagaaataagactctatcaagatccatagcatctgaagttatagccaggcctgcttcattgtctaatgataaactgatggaaaagtcagagcccgttgaccagcgaagacatactgcaggaaaagcaattgttgatagtagatcagctcagcccaaagaaacctcggaagagagaaaagctcgtctgagtgagtggaaagctggcaaaggaagagtgctaaaaaggccccctaattcagtagttactcagcatgagcctgcaggacaaaatgaaaaaccagttgggtctttttggactaccatggcagaagaagatgaacaaagattatttactgaaaaagtaaacaacacattttctgaatgcctgaacttgattaatgagggatgtccaaaagaagatatactggtcacactgaatgacctgattaaaaatattccagatgccaaaaagcttgttaagtattggatatgtcttgcacttattgaaccaatcacaagtcctattgaaaatattattgcaatctatgagaaagccattctggcaggggctcagcctattgaagagatgcgacacacgattgtagatattctaacaatgaagagtcaagaaaaagctaatttaggagaaaatatggagaagtcttgtgcaagcaaggaagaagtcaaagaagtcagtattgaagatacaggtgttgatgtagatccagaaaaactggaaatggagagtaaacttcatagaaatttgctatttcaagattgtgaaaaagagcaagacaacaaaacaaaagatccaacccatgatgttaaaacccccaatacagaaacgaggacaagttgcttaattaaatataatgtgtctactacgccatacttgcaaagtgtgaaaaaaaaggtgcagtttgatggaacaaattccgcatttaaagagctgaagtttttaacaccagtgagacgttctcgacgtcttcaagagaaaacttctaaattgccagatatgttaaaagatcattatccttgtgtgtcttcattggaacagctaacggagttgggaagagaaactgatgcttttgtatgccgccctaatgcagcactgtgccgggtgtactatgaggctgatacaacataa

SEQ ID NO: 1298 - DNA, 660 bp, homo sapiens
atgaattcatctaaatcatctgaaacacaatgcacagagagaggatgcttctcttcccaaatgttcttatggactgttgctgggatccccatcctatttctcagtgcctgtttcatcaccagatgtgttgtgacatttcgcatctttcaaacctgtgatgagaaaaagtttcagctacctgagaatttcacagagctctcctgctacaattatggatcaggttcagtcaagaattgttgtccattgaactgggaatattttcaatccagctgctacttcttttctactgacaccatttcctgggcgttaagtttaaagaactgctcagccatgggggctcacctggtggttatcaactcacaggaggagcaggaattcctttcctacaagaaacctaaaatgagagagttttttattggactgtcagaccaggttgtcgagggtcagtggcaatgggtggacggcacacctttgacaaagtctctgagcttctgggatgtaggggagcccaacaacatagctaccctggaggactgtgccaccatgagagactcttcaaacccaaggcaaaattggaatgatgtaacctgtttcctcaattattttcggatttgtgaaatggtaggaataaatcctttgaacaaaggaaaatctctttaa

SEQ ID NO: 1299 - DNA, 2541 bp, homo sapiens
atgttgtttaccgtaagctgtagtaaaatgagctcgattgttgacagagatgacagtagtatttttgatgggttggtggaagaagatgacaaggacaaagcgaaaagagtatctagaaacaaatctgaaaagaaacgtagagatcaatttaatgttctcattaaagaactgggatccatgcttcctggtaatgctagaaagatggacaaatctactgttctgcagaaaagcattgattttttacgaaaacataaagaaatcactgcacagtcagatgctagtgaaattcgacaggactggaaacctacattccttagtaatgaagagtttacacaattaatgttagaggctcttgatggtttttttttagcaatcatgacagatggaagcataatatatgtgtctgagagtgtaacttcattacttgaacatttaccatctgatcttgtggatcaaagtatatttaattttatcccagaaggggaacattcagaggtttataaaatactctctactcatctgctggaaagtgattcattaaccccagaatatttaaaatcaaaaaatcagttagaattctgttgtcacatgctgcgaggaacaatagacccaaaggagccatctacctatgaatatgtaaaatttataggaaatttcaaatctttaaacagtgtatcctcttcagcacacaatggttttgaaggaactatacaacgcacacataggccatcttatgaagatagagtttgttttgtagctactgtcaggttagctacacctcagttcatcaaggaaatgtgcactgttgaagaacccaatgaagagtttacatctagacatagtttagaatggaagtttctgtttctagatcacagggcaccacccataatagggtatttgccatttgaagttctgggaacatcaggctatgattactatcatgtggatgacctagaaaatttggcaaaatgtcatgagcacttaatgcaatatgggaaaggcaaatcatgttattataggttcctgactaaggggcaacagtggatttggcttcagactcattattatatcacttaccatcagtggaattcaaggccagagtttattgtttgtactcacactgtagtaagttatgcagaagttagggctgaaagacgacgagaacttggcattgaagagtctcttcctgagacagctgctgacaaaagccaagattctgggtcagataatcgtataaacacagtcagtctcaaggaagcattggaaaggtttgatcacagcccaaccccttctgcctcttctcggagttcaagaaaatcatctcacacggccgtctcagacccttcctcaacaccaaccaagatcccgacggatacgagcactccacccaggcagcatttaccagctcatgagaagatggtgcaaagaaggtcatcatttagtagtcagtccataaattcccagtctgttggttcatcattaacacagccagtgatgtctcaagctacaaatttaccaattccacaaggcatgtcccagtttcagttttcagctcaattaggagccatgcaacatctgaaagaccaattggaacaacggacacgcatgatagaagcaaatattcatcggcaacaagaagaactaagaaaaattcaagaacaacttcagatggtccatggtcaggggctgcagatgtttttgcaacaatcaaatcctgggttgaattttggttccgttcaactttcttctggaaattcatctaatatccagcaacttgcacctataaatatgcaaggccaagttgttcctactaaccagattcaaagtggaatgaatactggacacattggcacaactcagcacatgatacaacaacagactttacagagtacatcaactcagagtcaacaaaatgtactgagtgggcacagtcagcaaacatctctacccagtcagacacagagcactcttacagccccactgtataacactatggtgatttctcagcctgcagccggaagcatggtccagattccatctagtatgccacaaaacagcacccagagtgctgcagtaactacattcactcaggacaggcagataagattttctcaaggtcaacaacttgtgaccaaattagtgactgctcctgtagcttgtggggcagtcatggtacctagtactatgcttatgggccaggtggtgactgcatatcctacttttgctacacaacagcaacagtcacagacattgtcagtaacgcagcagcagcagcagcagagctcccaggagcagcagctcacttcagttcagcaaccatctcaggctcagctgacccagccaccgcaacaatttttacagacttctaggttgctccatgggaatccctcaactcaactcattctctctgctgcatttcctctacaacagagcaccttccctcagtcacatcaccagcaacatcagtctcagcaacagcagcaactcagccggcacaggactgacagcttgcccgacccttccaaggttcaaccacagtag

SEQ ID NO: 1300 - DNA, 1242 bp, homo sapiens
atgtctttccgcgacctccgcaatttcacagagatgatgagagccctgggataccctcgacatatttctatggaaaatttccgtacacccaattttggacttgtatctgaagtgcttctctggcttgtgaaaagatatgagccccagactgacatcccgcctgacgtggatactgaacaggaccgagttttcttcattaaggcaattgcccagttcatggccaccaaggcacatataaaactcaacactaagaagctttatcaagcagatgggtatgcggtaaaagagctgctgaagatcacatctgtcctttataatgctatgaagaccaaggggatggagggctctgaaatagtagaggaagatgtcaacaagttcaagtttgatcttggctcaaagattgcagatttgaaggcagccaggcagcttgcgtctgaaatcacctccaaaggagcatctctgtatgacttgctcggcatggaagtagagttgagggaaatgagaacagaagccattgccagacctctggaaataaacgagactgaaaaagtgatgagaattgcaataaaagagattttgacacaggttcagaagactaaagacctgctcaataatgtggcctctgatgaagctaatttagaagccaaaatcgaaaagagaaaattagaactggaaagaaatcggaagcgactagagactctgcagagtgtcaggccatgttttatggatgagtatgagaagactgaggaagaattacaaaagcagtatgacacttatctggagaaatttcaaaatctgacttatctggaacaacagcttgaagaccatcataggatggagcaagaaaggtttgaggaagctaaaaacactctctgcctgatacagaacaagctcaaggaggaagagaagcgcctgctcaagagtggaagtaacgatgactcggacatagacatccaggaggacgatgaatccgacagtgagttggaagaaaggcggctgcccaagccacagacagccatggagatgctcatgcaaggaagacctggcaaacgcattgtgggcacgatgcaaggtggagactccgatgacaatgaggactcggaggagagtgaaattgacatggaagatgatgatgacgaggatgacgatttggaagacgagagcatttctctctcaccaaccaagcccaatcgaagggtccggaaatctgaacccctggatgagagtgacaatgacttctga

SEQ ID NO: 1301 - DNA, 1254 bp, homo sapiens
atgaggctcatcctgcctgtgggtttgattgctaccactcttgcaattgctcctgtccgctttgacagggagaaggtgttccgcgtgaagccccaggatgaaaaacaagcagacatcataaaggacttggccaaaaccaatgagcttgacttctggtatccaggtgccacccaccacgtagctgctaatatgatggtggatttccgagttagtgagaaggaatcccaagccatccagtctgccttggatcaaaataaaatgcactatgaaatcttgattcatgatctacaagaagagattgagaaacagtttgatgttaaagaagatatcccaggcaggcacagctacgcaaaatacaataattgggaaaagattgtggcttggactgaaaagatgatggataagtatcctgaaatggtctctcgtattaaaattggatctactgttgaagataatccactatatgttctgaagattggggaaaagaatgaaagaagaaaggctatttttacggattgtggcattcacgcacgagaatgggtctccccagcattctgccagtggtttgtctatcaggcaaccaaaacttatgggagaaacaaaattatgaccaaactcttggaccgaatgaatttttacattcttcctgtgttcaatgttgatggatatatttggtcatggacaaagaaccgcatgtggagaaaaaatcgttccaagaaccaaaactccaaatgcatcggcactgacctcaacaggaattttaatgcttcatggaactccattcctaacaccaatgacccatgtgcagataactatcggggctctgcaccagagtccgagaaagagacgaaagctgtcactaatttcattagaagccacctgaatgaaatcaaggtttacatcaccttccattcctactcccagatgctattgtttccctatggatatacatcaaaactgccacctaaccatgaggacttggccaaagttgcaaagattggcactgatgttctatcaactcgatatgaaacccgctacatctatggcccaatagaatcaacaatttacccgatatcaggttcttctttagactgggcttatgacctgggcatcaaacacacatttgcctttgagctccgagataaaggcaaatttggttttctccttccagaatcccggataaagccaacgtgcagagagaccatgctagctgtcaaatttattgccaagtatatcctcaagcatacttcctaa

SEQ ID NO: 1302 - DNA, 984 bp, homo sapiens; identical to SEQ ID NO: 249

SEQ ID NO: 1303 - DNA, 1563 bp, homo sapiens
atgccacagctgagcctgtcctcgctgggcctttggccaatggcagcatccccgtggctgctcctgctgctggttggggcctcctggctcctggcccgcatcctggcctggacctataccttctatgacaactgctgccgcctccggtgtttcccgcaacccccgaaacggaattggttcttgggtcacctgggcctgattcacagctcggaggaaggtctcctatacacacaaagcctggcatgcaccttcggtgatatgtgctgctggtgggtggggccctggcacgcaatcgtccgcatcttccaccccacctacatcaagcctgtgctctttgctccagctgccattgtaccaaaggacaaggtcttctacagcttcctgaagccctggctgggggatgggctcctgctgagtgctggtgaaaagtggagccgccaccgtcggatgctgacgcctgccttccatttcaacatcctgaagccctatatgaagattttcaatgagagtgtgaacatcatgcatgccaagtggcagctcctggcctcagagggtagtgcccgtctggacatgtttgagcacatcagcctcatgaccttggacagtctgcagaaatgtgtcttcagctttgacagccattgccaggagaagcccagtgaatatattgccgccatcttggagctcagtgcccttgtgacaaaaagacaccagcagatcctcctgtacatagacttcctgtattatctcacccctgatgggcagcgtttccgcagggcctgccgcctggtgcacgacttcacagatgccgtcatccaggagcggcgccgcaccctccctagccagggtgttgatgacttcctccaagccaaggccaaatccaagactttggacttcattgatgtactcctgctgagcaaggatgaagatgggaagaagttgtccgatgaggacataagagcagaagctgacacctttatgtttgagggccatgacaccacagccagtggtctctcctgggtcctgtaccaccttgcaaagcacccggaataccaggagcgctgtcggcaggaggtgcaagagcttctgaaggaccgtgagcctaaagagattgaatgggacgacctggcccagctgcccttcctgaccatgtgcattaaggagagcctgaggctgcatcccccagtccctgccgtctctcgctgctgcacccaagacattgtgctcccagacggccgggtcatccccaaaggcattatctgcctcatcagtgtttttggaacccatcacaacccagccgtgtggccggaccctgaggtctatgacccctttcgctttgacccaaagaacatcaaggagaggtcacctctggcttttattcccttctcagcagggcccaggaactgcatcgggcaggcgttcgcgatggcggagatgaaggtggtcctggggctcacgctgctgcgcttccgcgtcctgcctgaccacaccgagccccgcaggaagccggagctggtcctgcgcgcagagggcggactttggctgcgggtggagcccctgagctga

SEQ ID NO: 1304 - DNA, 1014 bp, homo sapiens
atggatgaaacaggaaatctgacagtatcttctgccacatgccatgacactattgatgacttccgcaatcaagtgtattccaccttgtactctatgatctctgttgtaggcttctttggcaatggctttgtgctctatgtcctcataaaaacctatcacaagaagtcagccttccaagtatacatgattaatttagcagtagcagatctactttgtgtgtgcacactgcctctccgtgtggtctattatgttcacaaaggcatttggctctttggtgacttcttgtgccgcctcagcacctatgctttgtatgtcaacctctattgtagcatcttctttatgacagccatgagctttttccggtgcattgcaattgtttttccagtccagaacattaatttggttacacagaaaaaagccaggtttgtgtgtgtaggtatttggatttttgtgattttgaccagttctccatttctaatggccaaaccacaaaaagatgagaaaaataataccaagtgctttgagcccccacaagacaatcaaactaaaaatcatgttttggtcttgcattatgtgtcattgtttgttggctttatcatcccttttgttattataattgtctgttacacaatgatcattttgaccttactaaaaaaatcaatgaaaaaaaatctgtcaagtcataaaaaggctataggaatgatcatggtcgtgaccgctgcctttttagtcagtttcatgccatatcatattcaacgtaccattcaccttcattttttacacaatgaaactaaaccctgtgattctgtccttagaatgcagaagtccgtggtcataaccttgtctctggctgcatccaattgttgctttgaccctctcctatatttcttttctgggggtaactttaggaaaaggctgtctacattcagaaagcattctttgtccagcgtgacttatgtacccagaaagaaggcctctttgccagaaaaaggagaagaaatatgtaaagtatag

SEQ ID NO: 1305 - DNA, 3306 bp, homo sapiens
atggagcagcccggggcggcggcgtcgggagcgggaggcggcagcgaggaacccggtgggggccggagcaacaagcggagcgcggggaaccgggccgccaatgaagaggaaacgaaaaacaaacccaaattgaacattcaaataaaaactttggcagatgatgtgcgtgaccgaattacaagttttagaaaatctactgtcaaaaaagaaaaacctcttattcaacatcctattgattctcaagtcgcgatgagtgagtttcctgcagctcagccattatatgatgaacgatctttgaatttgtcagaaaaggaagtattggatctctttgaaaaaatgatggaggacatgaaccttaacgaagagaaaaaagctcctttacgaaacaaagactttaccaccaaacgtgagatggttgtccagtatatttctgccactgccaaatctggtgggctgaaaaacagcaaacatgaatgcaccctgtcttcacaagaatatgttcatgaattacgatcgggtatatcagatgagaaacttcttaattgcctagaatccctcagggtttctttaaccagcaatccggtcagctgggttaacaactttggccatgaaggtcttggactcttattggatgagctggaaaagcttctggacaaaaaacagcaagaaaatattgacaagaagaatcagtataaacttattcaatgcctcaaagcatttatgaataataagtttggattacaaaggattctaggagatgaaagaagtcttttactattggcaagagcaattgaccccaaacaacccaacatgatgactgaaatagtaaaaatactttctgctatttgcattgttggagaagagaacattctagataaacttttaggggctataacaacagcagcagaaagaaataacagggaacgattttcaccaattgtggaaggtttagaaaatcaggaagccttgcaattacaggtggcctgcatgcagtttataaatgcccttgtcacttctccttatgagcttgattttcgaatacatttaaggaatgaattcctccgttcaggactaaaaacaatgttaccagatctaaaagaaaaagagaatgatgagcttgatattcagttgaaagtatttgatgaaaacaaagaagatgacctaactgaattatcacaccgtctcaatgacattcgagcagaaatggatgatatgaatgaagtctaccatcttctatataatatgctgaaggacactgctgctgaaaattacttcttatctattctacaacattttttgcttatcagaaatgattattatatcaggccacaatattataaaataattgaggaatgtgtttcacagatagtgctacactgcagtggtatggatccagacttcaaatacaggcaaagattagacatcgatttaactcatctgatagattcttgtgtgaacaaggcgaaagttgaagaaagtgaacaaaaagctgcagagttttcaaagaagttcgatgaagaattcacagctcgacaggaagctcaagcagagcttcaaaaaagagatgagaaaatcaaagaacttgaagcagaaatccagcaacttcgaacccaggcacaagtactctcaagttcatcaggaattccaggtcctcctgcagcacctccattgccaggtgtagggccgcctccaccaccacccgcgccacctctacccggaggagctcctcttcctcctccaccacctcctttacctggaatgatggggataccaccaccacccccaccaccacttttatttgggggacctcctccaccaccaccccttggaggagttcctcctcccccaggaatatcacttaatctaccttatggaatgaagcagaaaaaaatgtataaacctgaagtgtccatgaagagaatcaattggtcaaagattgaacccacagaattatctgagaactgtttctggttaagagtcaaagaagacaagtttgagaatccagatctctttgccaaattggcattgaattttgctactcagataaaagttcaaaagaacgcagaagcattagaagaaaagaagactgggcctacaaagaagaaagtgaaagaactgagaattttggatcccaaaacagctcagaatctgtccatctttctgggatcatatcgcatgccatatgaagacataagaaacgttattctggaggttaatgaagacatgctgagtgaggctttaattcagaaccttgtgaaacatcttcctgagcagaagatactcaacgaattagcagagcttaagaatgaatatgatgacctctgtgagcctgaacaatttggagttgtgatgagctctgtgaaaatgttacagcctcgtctcagtagtatcctgttcaagctcacatttgaagaacacataaacaacatcaaaccaagcatcatagcagtaactcttgcctgtgaagaactgaagaaaagtgaaagctttaacagacttttagagttagttcttcttgttggaaactacatgaactcaggctcaagaaatgcccagtctttgggatttaagatcaacttcctttgtaagatcagagatactaaatcagcggatcaaaaaacaacccttttgcattttattgccgacatttgtgaggaaaaatatcgagatatcctaaaatttcctgaagaactggaacacgtagaaagtgcaagcaaagtttcagctcaaattctcaagagcaaccttgcatcaatggaacaacaaattgttcatctggaacgtgacatcaagaaattcccccaagcagaaaatcaacacgataagtttgtggaaaagatgaccagctttacaaagactgcccgagaacagtatgaaaaactctccaccatgcacaacaacatgatgaagctctatgagaatcttggagaatacttcatttttgactcaaagacagtgagcatagaagagttctttggtgatctcaacaacttccgaactttgtttttggaagcagtgagagaaaacaataagagaagagaaatggaagagaagaccaggagggcaaaacttgcaaaagagaaagctgaacaagaaaagttagaacgccagaagaaaaagaaacaactcattgatataaacaaagagggtgatgagactggtgtgatggataatcttctagaagccctacaatcaggtgcagcattcagagaccgtcgaaagcggattccaaggaatccagataacagacgagtacctttggaaaggtcacgctctcgccacaatggagctatctcatctaagtga

SEQ ID NO: 1306 - DNA, 723 bp, homo sapiens
atggccacggacgagctggccaccaagctgagccggcggctgcagatggagggcgagggcggcggcgagaccccggagcagcccgggctgaacggggcagcggcggcggcggcgggggcacccgacgaggcggccgaggcgctgggcagcgcggactgcgagctgagcgccaagctgctgcggcgcgcagacctcaaccagggcatcggcgagccccagtcgcccagccgccgcgtcttcaacccctacaccgagttcaaggagttctccaggaagcagatcaaggacatggagaagatgttcaagcagtatgatgccgggcgggacggcttcatcgacctgatggagctaaaactcatgatggagaaacttggggcccctcagacccacctgggcctgaaaaacatgatcaaggaggtggatgaggactttgacagcaagctgagcttccgggagttcctcctgatcttccgcaaggcggcggccggggagcttcaggaggacagcgggctgtgcgtgctggcccgcctctctgagatcgacgtctccagtgagggtgtcaagggggccaagagcttctttgaggccaaggtccaggccatcaacgtgtccagccgcttcgaggaggagatcaaggcagagcaggaggaaaggaagaagcaggcggaggagatgaagcagcggaaagcggccttcaaggagctgcagtccacctttaagtag

SEQ ID NO: 1307 - DNA, 3363 bp, homo sapiens
atggtgctcaacagtttggataagatgattcaactccagaaaaacactgccaacatcaggaatatttgtgttttggctcatgttgaccatggaaaaactactctggctgactgtcttatatctagcaatggaatcatctccagccgcctagcaggcaagttaaggtacatggacagcagagaagatgaacagatccgagggatcactatgaaatccagtgccatttccctacattatgcaacaggtaatgaggagtacctgatcaatctgatagactctccaggacacgtggacttttcctcagaagtatcaaccgctgttcgcatttgtgatggatgcatcattgtggtagatgctgtggaaggagtctgtccacagacacaggcagttctgcgacaagcttggcttgaaaacatccgtccggttttagtgattaataagattgatcgcttgatagtggaactgaaattcaccccacaagaggcctattctcacctcaagaatattttagaacagattaatgcgctcacagggactctttttacttctaaagtcctagaagaaagagcagagagggagactgaatcccaagtgaatccaaattctgaacaaggagagcaagtatatgactggagcactggcttggaggacacagatgattctcacctttacttctctccagaacagggaaatgtggtgtttaccagtgcaatagatgggtggggctttggaattgagcacttcgccagaatctacagtcaaaaaattggcatcaaaaaggaagttcttatgaaaaccttgtggggagattactatataaatatgaaggctaaaaagatcatgaagggtgatcaggccaaaggaaagaaacctttatttgtacagttgatcctggaaaatatatggagtttgtatgatgctgttttgaaaaaggacaaagacaaaattgataaaatagtgacttctttaggattaaaaattggagcccgggaggcacgacattcagaccctaaagttcagatcaacgccatttgcagtcagtggctacccatatcccatgctgttcttgctatggtgtgtcagaaacttcctagtccccttgatattacagctgagagagtggagagactgatgtgcacaggatcacaaacttttgactcttttccaccagaaactcaagcactgaaagcagcttttatgaaatgtggaagtgaggacactgctccagttattatatttgtttccaaaatgtttgcagttgatgctaaggccttgcctcagaataagccaaggcctctcactcaagaagaaattgctcagagacgtgagcgtgcaagacaaaggcatgcagagaagcttgcagcagcacagggacaggcacccttggagcccacccaagatgggagtgccattgaaacatgtccaaaaggagaggagccaagaggtgacgagcaacaggtggaaagtatgacccctaaacctgtgctccaggaagaaaacaaccaagagtcttttattgcatttgctcgggtgttcagtggtgtggctcgaagaggaaagaaaatttttgtcttggggcccaaatacagtcctcttgagtttttacgaagggtaccattaggcttctcagctccaccagatggcctcccccaagtcccccacatggcatactgtgctctggaaaacctgtatcttctgatgggaagggaactggaatatctagaggaggtacctccaggaaatgtgctaggaataggaggccttcaagattttgtgctgaaatctgcaacactgtgtagcctgccatcctgcccaccatttataccactcaacttcgaagccactcctattgtgagagttgctgttgaaccaaaacatccaagtgaaatgcctcagctcgtaaaaggaatgaaactgttaaaccaggctgatccctgtgtccagattttaattcaggaaacgggagagcacgttttagtcacagcaggagaagtccaccttcagcgatgcctggatgacttaaaagaaaggtttgcaaagattcatatcagtgtatctgaacctattattccattcagagaaacaatcacaaaacccccaaaagttgacatggtcaatgaagaaataggcaaacagcaaaaagttgcagtcatacaccaaatgaaagaagatcaaagcaaaatccctgaaggaatccaagttgactctgacgggctaatcaccataacaactcccaataaacttgccacgctcagtgttcgagccatgccccttccagaagaagtcacccagattctggaagaaaatagtgatttgattcgttctatggagcagttgacatcctctttgaatgagggtgaaaatactcacatgattcatcagaagacccaagagaaaatttgggaattcaaaggaaaactggagcaacacctaacagggagaagatggaggaacattgttgaccaaatctggtcatttggcccaagaaaatgtgggcccaacatactagtcaataaaagtgaagattttcagaactcagtatggacaggtccagctgacaaagcttcaaaagaagccagtagataccgagatttgggcaatagcattgtgagtggcttccaactagcaaccctctctggccccatgtgtgaggagcctctcatgggtgtctgttttgttctggaaaaatgggacctaagtaaatttgaggaacaaggagcaagtgatctggcaaaagagggacaggaggaaaatgaaacctgttctggtggaaatgaaaaccaagagctacaagatggctgctctgaggcctttgagaagaggacatcacagaaaggagaatctccactcactgactgctatggacctttctcaggacagctaattgccaccatgaaagaagcatgtcgctatgcactgcaagtgaaacctcagcgcctgatggcagctatgtacacatgtgacatcatggccactggtgatgttctcggtcgagtctatgctgtcttgtcaaagagagaaggtcgggtacttcaagaagaaatgaaagaagggacagacatgttcatcatcaaggctgtgctgcctgttgctgaaagctttggttttgctgatgaaatcaggaagaggacaagtggcctggccagcccacaactagtattcagccattgggagatcattcccagtgaccccttctgggtgccaactactgaggaggaatacttgcactttggggagaaggctgactctgagaaccaagcccggaagtacatgaacgcagtacgaaagcggaaggggctttatgtggaagaaaagattgtggagcatgcagaaaagcagaggacactcagcaaaaataagtag

SEQ ID NO: 1308 - DNA, 3663 bp, homo sapiens
atggggaagaaacagaaaaacaagagcgaagacagcaccaaggatgacattgatcttgatgccttggctgcagaaatagaaggagctggtgctgccaaagaacaggagcctcaaaagtcaaaagggaaaaagaaaaaagagaaaaaaaagcaggactttgatgaagatgatatcctgaaagaactggaagaattgtctttggaagctcaaggcatcaaagctgacagagaaactgttgcagtgaagccaacagaaaacaatgaagaggaattcacctcaaaagataaaaaaaagaaaggacagaagggcaaaaaacagagttttgatgataatgatagcgaagaattggaagataaagattcaaaatcaaaaaagactgcaaaaccgaaagtggaaatgtactctgggagtgatgatgatgatgattttaacaaacttcctaaaaaagctaaagggaaagctcaaaaatcaaataagaagtgggatgggtcagaggaggatgaggataacagtaaaaaaattaaagagcgttcaagaataaattcttctggtgaaagtggtgatgaatcagatgaatttttgcaatctagaaaaggacagaaaaaaaatcagaaaaacaagccaggtcctaacatagaaagtgggaatgaagatgatgacgcctccttcaaaattaagacagtggcccaaaagaaggcagaaaagaaggagcgcgagagaaaaaagcgagatgaagaaaaagcgaaactgcggaagctgaaagaaaaagaagagttagaaacaggtaaaaaggatcagagtaaacaaaaggaatctcaaaggaaatttgaagaagaaactgtaaaatccaaagtgactgttgatactggagtaattcctgcctctgaagagaaagcagagactcccacagctgcagaagatgacaatgaaggagacaaaaagaagaaagataagaagaaaaagaaaggagaaaaggaagaaaaagagaaagagaagaaaaaaggacctagcaaagccactgttaaagctatgcaagaagctctggctaagcttaaagaggaagaagaaagacagaagagagaagaggaagaacgtataaaacggcttgaagaattagaagccaagcgtaaagaagaggaacgattggaacaagaaaaaagagaaaggaaaaagcaaaaagaaaaagaaagaaaagaacgcttgaaaaaagaagggaaacttttaactaaatcccagagagaagccagagccagagccgaagctactcttaaactgctacaagctcagggtgttgaagtgccatcaaaagactctttgccaaagaagaggccaatttatgaagataaaaagaggaaaaaaataccacagcagctagaaagtaaagaagtgtctgaatcaatggaattatgtgctgctgtagaagttatggaacaaggagtaccagaaaaggaagagacaccacctcctgttgaaccagaagaagaagaagatactgaggatgctggattggatgattgggaagctatggccagtgatgaggagacagaaaaagtagaaggaaacaaagttcatatagaagtaaaagaaaaccctgaagaggaggaggaggaggaagaagaggaagaagaagatgaagaaagtgaagaagaggaggaagaggagggagaaagtgaaggcagtgaaggtgatgaggaagatgaaaaggtgtcagatgagaaggattcagggaagacattagataaaaagccaagtaaagaaatgagctcagattctgaatatgactctgatgatgatcggactaaagaagaaagggcttatgacaaagcaaaacggaggattgagaaacggcgacttgaacatagtaaaaatgtaaacaccgaaaagctaagagcccctattatctgcgtacttgggcatgtggacacagggaagacaaaaattctagataagctccgtcacacacatgtacaagatggtgaagcaggtggtatcacacaacaaattggggccaccaatgttcctcttgaagctattaatgaacagactaagatgattaaaaattttgatagagagaatgtacggattccaggaatgctaattattgatactcctgggcatgaatctttcagtaatctgagaaatagaggaagctctctttgtgacattgccattttagttgttgatattatgcatggtttggagccccagacaattgagtctatcaaccttctcaaatctaaaaaatgtcccttcattgttgcactcaataagattgataggttatatgattggaaaaagagtcctgactctgatgtggctgctactttaaagaagcagaaaaagaatacaaaagatgaatttgaggagcgagcaaaggctattattgtagaatttgcacagcagggtttgaatgctgctttgttttatgagaataaagatccccgcacttttgtgtctttggtacctacctctgcacatactggtgatggcatgggaagtctgatctaccttcttgtagagttaactcagaccatgttgagcaagagacttgcacactgtgaagagctgagagcacaggtgatggaggttaaagctctcccggggatgggcaccactatagatgtcatcttgatcaatgggcgtttgaaggaaggagatacaatcattgttcctggagtagaagggcccattgtaactcagattcgaggcctcctgttacctcctcctatgaaggaattacgagtgaagaaccagtatgaaaagcataaagaagtagaagcagctcagggggtaaagattcttggaaaagacctggagaaaacattggctggtttacccctccttgtggcttataaagaagatgaaatccctgttcttaaagatgaattgatccatgagttaaagcagacactaaatgctatcaaattagaagaaaaaggagtctatgtccaggcatctacactgggttctttggaagctctactggaatttctgaaaacatcagaagtgccctatgcaggaattaacattggcccagtgcataaaaaagatgttatgaaggcttcagtgatgttggaacatgaccctcagtatgcagtaattttggccttcgatgtgagaattgaacgagatgcacaagaaatggctgatagtttaggagttagaatttttagtgcagaaattatttatcatttatttgatgcctttacaaaatatagacaagactacaagaaacagaaacaagaagaatttaagcacatagcagtatttccctgcaagataaaaatcctccctcagtacatttttaattctcgagatccgatagtgatgggggtgacggtggaagcaggtcaggtgaaacaggggacacccatgtgtgtcccaagcaaaaattttgttgacatcggaatagtaacaagtattgaaataaaccataaacaagtggatgttgcaaaaaaaggacaagaagtttgtgtaaaaatagaacctatccctggtgagtcacccaaaatgtttggaagacattttgaagctacagatattcttgttagtaagatcagccggcagtccattgatgcactcaaagactggttcagagatgaaatgcagaagagtgactggcagcttattgtggagctgaagaaagtatttgaaatcatctaa

SEQ ID NO: 1309 - DNA, 1332 bp, homo sapiens
atggtgcgcggcaggatctcccggctctcggtccgggacgtgcgcttccccacgtcgcttgggggccacggcgcggacgccatgcacacggaccctgactactcggctgcctatgtcgtcatagaaactgatgcagaagatggaatcaaggggtgtggaattaccttcactctgggaaaaggcactgaagttgttgtctgtgctgtgaatgccctcgcccaccatgtgctcaacaaggacctcaaggacattgttggtgacttcagaggcttctataggcagctcacaagtgatgggcagctcagatggattggtccagaaaagggcgtggtgcacctggcgacagcggccgtcctaaacgcggtgtgggacttgtgggccaagcaggagggaaagcctgtctggaagttacttgtggacatggatcccaggatgctggtatcctgcatagatttcaggtacatcactgatgtcctgactgaggaggatgccctagaaatactgcagaaaggtcaaattggtaaaaaagaaagagagaagcaaatgctggcacaaggataccctgcttacacgacatcgtgcgcctggctggggtactcagatgacacgttgaagcagctctgtgcccaggcgctgaaggatggctggaccaggtttaaagtaaaggtgggtgctgatctccaggatgacatgcgaagatgccaaatcatccgagacatgattggaccggaaaagactttgatgatggatgccaaccagcgctgggatgtgcctgaggcggtggagtggatgtccaagctggccaagttcaagccattgtggattgaggagccaacctcccctgatgacattctggggcacgccaccatttccaaggcactggtcccattaggaattggcattgccacaggagaacagtgccacaatagagtgatatttaagcaactcctacaggcgaaggccctgcagttcctccagattgacagttgcagactgggcagtgtcaatgagaacctctcagtattgctgatggccaaaaagtttgaaattcctgtttgcccccatgctggtggagttggcctctgtgaactggtgcagcacctgattatatttgactacatatcagtttctgcaagccttgaaaatagggtgtgtgagtatgttgaccacctgcatgagcatttcaagtatcccgtgatgatccagcgggcttcctacatgcctcccaaggatcccggctactcaacagaaatgaaggaggaatctgtaaagaaacaccagtatccagatggtgaagtttggaagaaactccttcctgctcaagaaaattaa

SEQ ID NO: 1310 - DNA, 1533 bp, homo sapiens
atggaagatacaaaggagtctaacgtgaagacattttgctccaagaatatcctagccatccttggcttctcctctatcatagctgtgatagctttgcttgctgtggggttgacccagaacaaagcattgccagaaaacgttaagtatgggattgtgctggatgcgggttcttctcacacaagtttatacatctataagtggccagcagaaaaggagaatgacacaggcgtggtgcatcaagtagaagaatgcagggttaaaggtcctggaatctcaaaatttgttcagaaagtaaatgaaataggcatttacctgactgattgcatggaaagagctagggaagtgattccaaggtcccagcaccaagagacacccgtttacctgggagccacggcaggcatgcggttgctcaggatggaaagtgaagagttggcagacagggttctggatgtggtggagaggagcctcagcaactacccctttgacttccagggtgccaggatcattactggccaagaggaaggtgcctatggctggattactatcaactatctgctgggcaaattcagtcagaaaacaaggtggttcagcatagtcccatatgaaaccaataatcaggaaacctttggagctttggaccttgggggagcctctacacaagtcacttttgtaccccaaaaccagactatcgagtccccagataatgctctgcaatttcgcctctatggcaaggactacaatgtctacacacatagcttcttgtgctatgggaaggatcaggcactctggcagaaactggccaaggacattcaggttgcaagtaatgaaattctcagggacccatgctttcatcctggatataagaaggtagtgaacgtaagtgacctttacaagaccccctgcaccaagagatttgagatgactcttccattccagcagtttgaaatccagggtattggaaactatcaacaatgccatcaaagcatcctggagctcttcaacaccagttactgcccttactcccagtgtgccttcaatgggattttcttgccaccactccagggggattttggggcattttcagctttttactttgtgatgaagtttttaaacttgacatcagagaaagtctctcaggaaaaggtgactgagatgatgaaaaagttctgtgctcagccttgggaggagataaaaacatcttacgctggagtaaaggagaagtacctgagtgaatactgcttttctggtacctacattctctccctccttctgcaaggctatcatttcacagctgattcctgggagcacatccatttcattggcaagatccagggcagcgacgccggctggactttgggctacatgctgaacctgaccaacatgatcccagctgagcaaccattgtccacacctctctcccactccacctatgtcttcctcatggttctattctccctggtccttttcacagtggccatcataggcttgcttatctttcacaagccttcatatttctggaaagatatggtatag

SEQ ID NO: 1311 - DNA, 2751 bp, homo sapiens
atggagtcagggcagccggctcgacggattgccatggcgccgctgctggagtacgagcgacagctggtgctggaactgctcgacactgacgggctagtagtgtgcgcccgcgggctcggcgcggaccggctcctctaccactttctccagctgcactgccacccagcctgcctggtgctggtgctcaacacgcagccggccgaggaggagtattttatcaatcagctgaagatagaaggagttgaacacctccctcgccgtgtaacaaatgaaatcacaagcaacagtcgctatgaagtttacacacaaggtggtgttatatttgcgacaagtaggatacttgtggttgacttcttgactgatagaataccttcagatttaattactggcatcttggtgtatagagcccacagaataatcgagtcttgtcaagaagcattcatcttgcgcctctttcgccagaaaaacaaacgtggttttattaaagctttcacagacaatgctgttgcctttgatactggtttttgtcatgtggaaagagtgatgagaaatctttttgtgaggaaactgtatctgtggccaaggttccatgtagcagtaaactcatttttagaacagcacaaacctgaagttgtagaaatccatgtttctatgacacctaccatgcttgctatacagactgctatactggacattttaaatgcatgtctaaaggaactaaaatgccataacccatcgcttgaagtggaagatttatctttagaaaatgctattggaaaaccttttgacaagacaatccgccattatctggatcctttgtggcaccagcttggagccaagactaaatccttagttcaggatttgaagatattacgaactttgctgcagtatctctctcagtatgattgtgtcacatttcttaatcttctggaatctctgagagcaacggaaaaagcttttggtcagaattcaggttggctgtttcttgactccagcacctcgatgtttataaatgctcgagcaagggtttatcatcttccagatgccaaaatgagtaaaaaagaaaaaatatctgaaaaaatggaaattaaagaaggggaagaaacaaaaaaggaactggtcctagaaagcaacccaaagtgggaggcactgactgaagtattaaaagaaattgaggcagaaaataaggagagtgaagctcttggtggtccaggtcaagtactgatttgtgcaagtgatgaccgaacatgttcccagctgagagactatatcactcttggagcggaggccttcttattgaggctctacaggaaaacctttgagaaggatagcaaagctgaagaagtctggatgaaatttaggaaggaagacagttcaaagagaattaggaaatctcacaaaagacctaaagacccccaaaacaaagaacgggcttctaccaaagaaagaaccctcaaaaagaaaaaacggaagttgaccttaactcaaatggtaggaaaacctgaagaactggaagaggaaggagatgtcgaggaaggatatcgtcgagaaataagcagtagcccagaaagctgcccggaagaaattaagcatgaagaatttgatgtaaatttgtcatcggatgctgctttcggaatcctgaaagaacccctcactatcatccatccgcttctgggttgcagcgacccctatgctctgacaagggtactacatgaagtggagccaagatacgtggttctttatgacgcagagctaacctttgttcggcagcttgaaatttacagggcgagtaggcctgggaaacctctgagggtttactttcttatatacggaggttcaactgaggaacaacgctatctcactgctttgcggaaagaaaaggaagcttttgaaaaactcataagggaaaaagcaagcatggttgtccctgaagaaagagaaggcagagatgaaacaaacttagacctagtaagaggcacagcatctgcagatgtttccactgacactcggaaagccggtggccaggaacagaatggtacacagcaaagcatagttgtggatatgcgtgaatttcgaagtgagcttccatctctgatccatcgtcggggcattgacattgaacccgtgactttagaggttggagattacatcctcactccagaaatgtgcgtggagcgcaagagtatcagtgatttaatcggctctttaaataacggccgcctctacagccagtgcatctccatgtcccgctactacaagcgtcccgtgcttctgattgagtttgaccctagcaagcctttctctctcacttcccgaggtgccttgtttcaggagatctccagcaatgacattagttccaaactcactcttcttacacttcacttccccagactacggattctctggtgcccctctcctcatgcaacggcggagttgtttgaggagctgaaacaaagcaagccacagcctgatgcggcgacagcactggccattacagcagattctgaaacccttcccgagtcagagaagtataatcctggtccccaagacttcttgttaaaaatgccaggggtgaatgccaaaaactgccgctccttgatgcaccacgttaagaacatcgcagaattagcagccctgtcacaagacgagctcacgagtattctggggaatgctgcaaatgccaaacagctttatgatttcattcacacctcttttgcagaagtcgtatcaaaaggaaaagggaaaaagtga

SEQ ID NO: 1312 - DNA, 2556 bp, homo sapiens
atgtcatccaaacaagaaataatgagtgaccagcggtttagacgggttgcaaaggacccgagattttgggaaatgccagaaaaggatcgaaaagtcaaaattgacaagagatttcgagccatgtttcatgacaagaagttcaagttgaactatgccgtggataaaagagggcgccccattagccatagcactacagaggatttgaagcgtttttacgacctttcagattctgattccaatctctctggtgaagatagcaaagcattgagtcaaaagaaaataaagaagaaaaaaacccagactaaaaaagaaatcgattcaaaaaatctagttgagaaaaagaaagaaaccaagaaggctaatcacaagggttctgaaaataaaactgatttagataattctataggaattaaaaaaatgaaaacctcatgtaaatttaagatagattcaaacataagtccgaagaaggatagcaaagaatttacacaaaaaaataagaaagagaaaaaaaacattgttcaacatactacagactcttctctcgaagaaaaacaaaggacattagactcaggcacctctgaaattgtgaaatctcccagaatcgagtgttctaagacaagaagagaaatgcaatcagtggttcaactcataatgacaagagacagtgatggttatgaaaactcaacagatggtgaaatgtgtgacaaagatgctctggaggaagattcagaaagcgttagtgaaataggaagtgatgaggaatctgaaaatgaaattacaagtgttggtagagcttcaggtgatgacgatggaagtgaagatgatgaagaggaggatgaagatgaagaggaggatgaagatgaggatagtgaggatgatgataaaagtgacagtggccctgatcttgcaaggggtaaaggaaatatagaaactagttctgaagatgaagatgatacggcagatttgtttccagaagaatctggttttgagcatgcttggagagaattagataaagatgctcctcgtgctgatgagattacacgtcgattagcagtttgtaacatggactgggatagattaaaggcaaaagatttgctggctctgttcaattcatttaaacccaaaggaggtgtaatattttccgtcaagatatatccttcagaatttggaaaggagaggatgaaggaagagcaagttcaaggaccagtagagctattaagtattcctgaagatgccccagaaaaagactggacgtctagagaaaaattgagagattatcaattcaaacgactgaagtactattatgcagtagtagactgtgattctccggaaacagctagtaaaatttatgaggattgtgatggcctggaatttgaaagtagttgttctttcatagatctaaggtttataccagatgatattacttttgatgatgagcctaaggatgtagcctcagaagtgaatttaacagcatataaaccaaaatatttcacttctgctgcaatgggaacatcaacggtggaaatcacttgggatgagactgatcatgaaagaattacaatgctcaacaggaagtttaaaaaggaagagcttttggacatggattttcaagcctacttagcttcctctagtgaagatgaagaggagatagaagaggagctacaaggtgatgatggagtcaatgtagaagaagatgggaaaacaaagaaaagtcagaaggatgatgaagaacaaattgctaaatacaggcagctcttgcaggttattcaagaaaaagaaaagaaaggcaaagaaaatgatatggaaatggaaattaaatgggttccaggtcttaaagaaagtgcagaagagatggtcaaaaacaaattggaaggaaaggataaactgaccccttgggaacaatttttagagaagaagaaagagaaaaaaagactgaaaaggaaacagaaggctcttgctgaagaggccagtgaagaggaacttccctctgatgttgatttgaatgacccatactttgctgaagaagttaaacaaataggtataaataaaaaatcggtaaaatctgcaaaagatggcacatctccagaagaagaaattgaaatagaaagacaaaaggctgaaatggctttgcttatgatggatgaggacgaggacagtaagaaacacttcaattacaacaagattgtggagcaccagaatctgagcaaaaagaagaaaaagcagctcatgaaaaagaaggaattaatagaggatgactttgaggtaaatgttaacgatgcacggtttcaggcaatgtacacttcccacttgttcaatttggacccctcagatcccaatttcaagaaaacaaaagctatggaaaaaatccttgaggagaaggcccggcaaagagaacggaaagaacaagaacttactcaggcaataaagaaaaaagagagtgagattgaaaaggaatcacaaaggaagtccattgatcctgctttgtcaatgttgattaaatctataaaaaccaaaacagagcagtttcaagcaagaaaaaagcaaaaagtcaaataa

SEQ ID NO: 1313 - DNA, 1962 bp, homo sapiens
atgattcccccacaggaggcatccgctcgacggcgggagattgaggacaagctgaagcaggaggaggagactctgtccttcatccgagacagcctggagaagagcgaccagctcactaagaacatggtgtctatcttatcatcctttgagagccgccttatgaagctggagaactccatcatccctgtgcacaagcagacggagaatctgcagcggctgcaggagaatgttgagaagacgctgtcctgcctggaccatgtcatcagctactaccatgtggccagtgacactgagaagatcatcagagagggccccacaggtaggctggaagagtacctgggaagcatggccaagattcagaaggcagtggagtatttccaggacaacagcccagacagcccggaactcaacaaagtgaaactgctctttgagcgcgggaaggaggccctggagtccgaatttcgcagcctgatgacgcggcacagtaaggtcgtctcgcccgtgctcatcttggatctgatcagtggtgacgatgatctggaggcccaggaggacgtgaccctggagcacctgcccgagagcgtgctccaggatgtcattcgcatctcccgctggctggtggaatatggccgcaaccaagatttcatgaacgtctactaccagatacgctccagccagctggaccgctccatcaaaggactgaaggagcatttccataagagcagttcttcctctggggttccctactcccctgctatccccaacaagaggaaagacacacctaccaagaagccagtcaagcggccagggagagatgacatgctggacgtggagaccgatgcctacatccactgcgtcagtgccttcgtcaagctggcgcagagcgagtaccagctgctggccgacatcatccccgagcaccaccagaagaagaccttcgactccctgatacaggatgccctggatgggctgatgcttgaaggggagaacatcgtgtctgctgcccggaaggccattgtgcgacacgacttctccacggtgctcaccgtcttccccatcctgcgacacctcaagcagaccaagcctgagtttgaccaggtgctccagggcacggctgccagcacaaagaacaagctgcctggcctcatcacatccatggagaccatcggtgccaaagcgctggaggacttcgcagacaacatcaagaatgacccggacaaggagtacaacatgccgaaggacggcaccgtacacgagctcaccagcaatgccatcctcttcctgcagcagcttttggacttccaggagacggcaggcgccatgctggcctcccaagagaccagctcttcggccaccagctacagctctgagttcagcaagcggctgctaagcacctatatctgtaaagtgctgggcaacctgcagttgaacttgctgagcaagtccaaggtgtacgaggacccagctctgagcgccatcttcctgcacaacaactacaattacatcctcaagtccctggagaagtctgaactgatccagctggtggcagtgacacagaagactgctgagcgctcctaccgggagcacattgagcagcagatccagacctaccagcgcagctggttaaaggtgactgattacatcgcagagaagaatctacctgtgttccagccgggagtcaagctccgggacaaggagcggcagattatcaaggagcgttttaagggcttcaatgatggcctcgaagaactgtgcaaaatccagaaggcctgggctattccagacacagagcagagggacaggattcgccaggcccagaagaccattgtcaaggagacctacggggcctttctacagaagtttggcagcgtgcccttcaccaagaacccggagaagtacatcaagtacggggtggagcaggtgggcgacatgatcgatcgccttttcgacacctctgcctga

SEQ ID NO: 1314 - DNA, 2760 bp, homo sapiens; identical to SEQ ID NO: 17

SEQ ID NO: 1315 - DNA, 2133 bp, homo sapiens
atgttgacaactttgaagccatttggaagtgtttcagtggagagcaaaatgaataacaaagcgggctcctttttctggaaccttagacaattcagtacattagtttcaacaagcagaactatgaggctatgttgtttgggactttgcaaaccaaaaatagttcattcaaactggaacattttaaataactttcataacagaatgcaatcaactgatatcattagatatctctttcaggatgcattcatttttaaatcagatgttggctttcaaacaaagggcataagcactctaacagcccttagaattgaaagactactttatgctaaaagactgttttttgactcaaagcagtctcttgtccctgttgataaatctgatgatgaattgaagaaagtaaaccttaatcatgaagtctccaatgaagatgttcttaccaaggaaacaaaaccaaaccgtatcagcagtagaaaactgtctgaggaatgtaattccctgagtgatgtgttagatgcattttcaaaagcgcccacatttcctagtagcaactatttcacagcaatgtggacaattgccaaaagactgtctgatgaccagaagcgctttgaaaaacgactgatgtttagccaccctgcatttaatcagctctgtgaacatatgatgagagaagccaagatcatgcagtataagtacctactgttcagtcttcacgccatagtgaagcttggaatccctcagaacactattttggtgcagactttgctgagggtgacccaggaacgtatcaatgagtgtgatgagatatgcctttcagttttgtcaactgttttagaggcaatggaaccatgcaagaatgttcatgttctacgaacgggattcagaatactagttgatcagcaagtttggaaaatagaagatgtcttcacattacaagttgtgatgaagtgtattggaaaagatgcaccgattgctcttaagaggaaactggagatgaaagccttgagggaattagacagattttctgttttgaatagccaacacatgtttgaagtactagctgccatgaatcaccgatctcttatactcctggatgaatgcagtaaggtggtcctagataatatccatgggtgtcctttaagaataatgatcaacatattgcagtcctgcaaagacctccagtaccataatttggatctcttcaagggacttgcagattatgtggctgcaactttcgacatctggaagttcagaaaagttctttttatcctcattttatttgaaaaccttggctttcgacctgttggtttaatggacctgtttatgaagagaatagtagaggatcctgaatccctaaacatgaaaaacattctatctattcttcatacttactcttctctcaatcatgtctacaaatgccagaacaaagaacagttcgtggaagttatggctagtgctctgactggttatcttcacactatttcttctgaaaacttattggatgcagtatattcattttgcttgatgaattactttcccctggctccttttaatcagcttctgcaaaaagacatcatcagtgagctgctgacatcagatgacatgaagaatgcttacaagctgcatactttggatacttgtctaaaacttgatgatactgtctatctgagggacatagccttgtcactcccacagctgccgcgggagctgccatcgtcacatacaaatgcaaaggtggcagaggtgctgagcagccttctgggaggtgaaggacacttctcaaaggatgtgcacttgccacacaattatcatattgattttgaaatcagaatggacactaacaggaatcaagtgctaccactttctgatgtggatacaacttctgctacagatattcaaagagtagctgtgctatgtgtttccagatctgcttattgtttgggttcaagccaccccagaggattccttgctatgaaaatgcggcatttgaatgcaatgggttttcatgtgatcttggtcaataactgggagatggacaaactagagatggaagatgcagtcacatttttgaagactaaaatctattcagtagaagctcttcctgttgctgctgtaaatgtgcaaagcacacaataa

SEQ ID NO: 1316 - DNA, 597 bp, homo sapiens
atggggaagcaaaagaaaacaaggaagtatgcgaccatgaagcgaatgcttagtctcagagatcagaggcttaaagaaaaggatagattaaaacctaaaaagaaagaaaagaaggatcccagcgcattaaaggaaagagaagttccccaacacccttcctgcttatttttccaatataatacacagctgggcccaccttaccacatcctcgttgataccaactttatcaacttttccataaaagccaaactggacttagtgcagtcaatgatggactgtctgtatgccaagtgtatcccatgtataaccgattgtgtaatggctgaaattgagaaattggggcagaagtatcgagtggctctaaggattgccaaggatccaagatttgaacgattaccatgtacacacaaaggaacctatgcagatgactgcttagtacagagagtaactcagcataagtgttacattgtggccacagttgaccgggacctgaaaagaagaatccgtaagattcctggagttcctatcatgtacatttctaaccatagatacaacattgaacggatgccagatgattatggagcccctcgattctaa

SEQ ID NO: 1317 - DNA, 1239 bp, homo sapiens
atgacggatctatactacctcagtcagacagatggagcaggtgattggcgggaaaaagaggccaaagatctgacagaactggttcagcggagaataacatatcttcagaatcccaaggactgcagcaaagccaaaaagctggtgtgtaatatcaacaaaggctgtggctatggctgtcagctccatcatgtggtctactgcttcatgattgcatatggcacccagcgaacactcatcttggaatctcagaattggcgctatgctactggtggatgggagactgtatttaggcctgtaagtgagacatgcacagacagatctggcatctccactggacactggtcaggtgaagtgaaggacaaaaatgttcaagtggtcgagcttcccattgtagacagtcttcatccccgtcctccatatttacccttggctgtaccagaagacctcgcagatcgacttgtacgagtgcatggtgaccctgcagtgtggtgggtgtctcagtttgtcaaatacttgatccgcccacagccttggctagaaaaagaaatagaagaagccaccaagaagcttggcttcaaacatccagttattggagtccatgtcagacgcacagacaaagtgggaacagaagctgccttccatcccattgaagagtacatggtgcatgttgaagaacattttcagcttcttgcacgcagaatgcaagtggacaaaaaaagagtgtatttggccacagatgacccttctttattaaaggaggcaaaaacaaagtaccccaattatgaatttattagtgataactctatttcctggtcagctggactgcacaatcgatacacagaaaattcacttcgtggagtgatcctggatatacattttctctctcaggcagacttcctagtgtgtactttttcatcccaggtctgtcgagttgcttatgaaattatgcaaacactacatcctgatgcctctgcaaacttccattctttagatgacatctactattttgggggccagaatgcccacaatcaaattgccatttatgctcaccaaccccgaactgcagatgaaattcccatggaacctggagatatcattggtgtggctggaaatcattgggatggctattctaaaggtgtcaacaggaaattgggaaggacgggcctatatccctcctacaaagttcgagagaagatagaaacggtcaagtaccccacatatcctgaggctgagaaataa

SEQ ID NO: 1318 - DNA, 1401 bp, homo sapiens
atggtgatggagaagcctagtcccctgctggtcgggcgggaatttgtgagacagtattacacactgctgaaccaggccccagacatgctgcatagattttatggaaagaactcttcttatgtccatgggggattggattcaaatggaaagccagcagatgcagtctacggacagaaagaaatccacaggaaagtgatgtcacaaaacttcaccaactgccacaccaagattcgccatgttgatgctcatgccacgctaaatgatggtgtggtagtccaggtgatggggcttctctctaacaacaaccaggctttgaggagattcatgcaaacgtttgtccttgctcctgaggggtctgttgcaaataaattctatgttcacaatgatatcttcagataccaagatgaggtctttggtgggtttgtcactgagcctcaggaggagtctgaagaagaagtagaggaacctgaagaaagacagcaaacacctgaggtggtacctgatgattctggaactttctatgatcaggcagttgtcagtaatgacatggaagaacatttagaggagcctgttgctgaaccagagcctgatcctgaaccagaaccagaacaagaacctgtatctgaaatccaagaggaaaagcctgagccagtattagaagaaactgcccctgaggatgctcagaagagttcttctccagcacctgcagacatagctcagacagtacaggaagacttgaggacattttcttgggcatctgtgaccagtaagaatcttccacccagtggagctgttccagttactgggataccacctcatgttgttaaagtaccagcttcacagccccgtccagagtctaagcctgaatctcagattccaccacaaagacctcagcgggatcaaagagtgcgagaacaacgaataaatattcctccccaaaggggacccagaccaatccgtgaggctggtgagcaaggtgacattgaaccccgaagaatggtgagacaccctgacagtcaccaactcttcattggcaacctgcctcatgaagtggacaaatcagagcttaaagatttctttcaaagttatggaaacgtggtggagttgcgcattaacagtggtgggaaattacccaattttggttttgttgtgtttgatgattctgagcctgttcagaaagtccttagcaacaggcccatcatgttcagaggtgaggtccgtctgaatgtcgaagagaagaagactcgagctgccagggaaggcgaccgacgagataatcgccttcggggacctggaggccctcgaggtgggctgggtggtggaatgagaggccctccccgtggaggcatggtgcagaaaccaggatttggagtgggaagggggcttgcgccacggcagtga

SEQ ID NO: 1319 - DNA, 1917 bp, homo sapiens; identical to SEQ ID NO: 22

SEQ ID NO: 1320 - DNA, 903 bp, homo sapiens
atggagaagactcaagaaacagtccaaagaattcttctagaaccctataaatacttacttcagttaccaggtaaacaagtgagaaccaaactttcacaggcatttaatcattggctgaaagttccagaggacaagctacagattattattgaagtgacagaaatgttgcataatgccagtttactcatcgatgatattgaagacaactcaaaactccgacgtggctttccagtggcccacagcatctatggaatcccatctgtcatcaattctgccaattacgtgtatttccttggcttggagaaagtcttaacccttgatcacccagatgcagtgaagctttttacccgccagcttttggaactccatcagggacaaggcctagatatttactggagggataattacacttgtcccactgaagaagaatataaagctatggtgctgcagaaaacaggtggactgtttggattagcagtaggtctcatgcagttgttctctgattacaaagaagatttaaaaccgctacttaatacacttgggctctttttccaaattagggatgattatgctaatctacactccaaagaatatagtgaaaacaaaagtttttgtgaagatctgacagagggaaagttctcatttcctactattcatgctatttggtcaaggcctgaaagcacccaggtgcagaatatcttgcgccagagaacagaaaacatagatataaaaaaatactgtgtacattatcttgaggatgtaggttcttttgaatacactcgtaatacccttaaagagcttgaagctaaagcctataaacagattgatgcacgtggtgggaaccctgagctagtagccttagtaaaacacttaagtaagatgttcaaagaagaaaatgaataa

SEQ ID NO: 1321 - DNA, 858 bp, homo sapiens
atgaccactttaactcaccgggcccgtcgcactgaaataagcaagaactctgaaaagaagatggaaagtgaggaagacagtaattgggagaaaagtccagacaatgaagattctggagactctaaggatatccgccttactcttatggaagaagtattgcttctgggactaaaagataaagaggggtacacatctttctggaatgactgcatatcatcaggcctgcgagggggcatcctgatagagctggccatgcggggtcgaatctatctggaacccccgaccatgcgtaagaagcgactactagacagaaaggtactgctaaagtcagacagcccaacaggtgatgttttactggatgaaactctgaaacacatcaaagcaactgaacccacagaaactgtccaaacatggatagagctactcactggtgagacctggaaccccttcaaattacagtaccagctgagaaatgtacgagagcgcatcgcaaagaacctagtagagaaaggtattctaaccactgagaagcagaatttcctgctatttgacatgactactcatccagtgaccaatacaacagagaaacagcgactagtgaaaaaacttcaagatagtgtactagagcggtgggtaaatgaccctcagcgtatggacaagcgaacactagcactcctggtgctagcccactcctctgatgtgctagagaatgtcttctcctctctgacagatgacaagtatgatgtggcaatgaatcgagccaaggacttagtagaactggaccctgaagtggaagggacaaagcctagtgccacagaaatgatctgggctgtgctggcagccttcaataaatcttaa

SEQ ID NO: 1322 - DNA, 1974 bp, homo sapiens; identical to SEQ ID NO: 27

SEQ ID NO: 1323 - DNA, 6435 bp, homo sapiens
atgacgtccttagcccagcagctgcaacgactcgccctccctcaaagtgatgccagcctcttatctagagatgaagttgcttctttgttatttgaccctaaggaagcggccacaatcgacagggacaccgccttcgccattggatgtactggcctggaagagttgcttggaattgatccttcctttgagcagtttgaagcaccgttgttcagtcagctagcaaaaaccttggagcgaagtgttcagaccaaagcagtaaacaaacagttggatgaaaacatttcattattccttattcacttgtcgccttacttcctgcttaagccagcacagaagtgtctggagtggttgattcacaggttccatatacatctctataatcaagatagcctcattgcttgtgttctgccataccacgagacaagaatatttgtgcgagtcatacagcttctaaaaattaataattcaaagcacagatggttctggttgttgccagttaagcaatctggagtgccgttagctaaaggaactttgattacccactgctacaaagatcttggattcatggatttcatttgcagtttggtgacaaaatctgtgaaggtttttgctgagtacccgggcagctcagctcagttgagggtgctcttggctttctatgcttctaccatagtgtcggcgctggtagctgcagaggacgtatcagacaatatcatcgccaaactatttccctatatccaaaagggattgaaatcatctttaccagattacagagctgcaacatacatgataatatgtcagatttctgtgaaagtgaccatggaaaatacctttgtgaattcattggcatcacagatcatcaaaacattgaccaagattccctctttgatcaaggatgggttaagttgcttgatagtgctcctgcagagacagaagccagagagccttgggaaaaagccattccctcacttatgtaatgttcctgatcttattacaatacttcatgggatttctgaaacttacgatgtcagtcctcttctgcattacatgcttccccatctggtcgtctccatcattcatcatgttacaggagaagaaactgaaggaatggatggtcaaatctacaagagacacttagaagctatacttacaaaaatatcactgaagaacaacttagaccatttgttggctagccttctatttgaagagtatatttcatatagttcacaggaagaaatggattctaataaagtgtctttgcttaatgaacaatttcttccactcattaggcttttagaaagcaaataccccagaacattagatgttgtattagaggaacacttaaaggaaattgcagatctgaaaaaacaagagcttttccatcagtttgtttctctttctacaagtggaggaaagtatcagtttttagcagattctgatacttctttgatgctcagcctgaatcatccacttgctcctgtgagaattctggccatgaatcatttgaaaaagatcatgaaaacatcaaaggagggtgttgatgaatctttcataaaagaagctgttttagcccgattaggtgatgataatatagatgttgttttgtcggctataagtgcttttgagattttcaaagaacacttcagttcagaagtgacgatttcaaatcttctgaatctctttcaaagagcagaactttcaaagaatggagaatggtacgaggtacttaagatagccgctgacatattaattaaagaagagatactgagtgaaaatgatcagttgtcaaatcaggtggttgtatgtttgctgccatttatggttatcaataatgatgatacggaatctgctgagatgaaaattgctatatatttatcaaaatcaggaatctgctccctgcaccctctattaagaggctgggaagaagctcttgaaaatgtaattaaaagcacaaagccaggaaaactaatcggtgtagcaaatcagaagatgattgagttgttggctgataatataaatttaggagatccttcttcaatgttaaagatggtggaggatttaataagcgtgggtgaggaggagtcctttaacctgaagcagaaagtaacgtttcatgtgatcctgtctgtgctcgtctcttgttgttcatctttaaaagaaacccactttccatttgcgataagagtcttcagtttgttgcagaaaaaaataaagaagcttgaaagtgtcattactgcagtggaaatcccctcagaatggcacattgaactgatgttagacagagggatcccagtggagctgtgggcacattatgtagaagagctcaacagcactcagagggtggccgtggaggactcggtttttcttgtattttccttgaaaaaatttatttatgcactgaaagctcctaaatcttttcctaaaggtgatatatggtggaatcctgaacaactgaaagaagacagcagggactatctgcacttgctcattgggctgtttgagatgatgctcaatggtgccgatgctgttcatttcagagttctgatgaaacttttcataaaggtgcatctagaagatgtttttcagttattcaagttctgttctgttttatggacctatggttctagcctttcaaatccactaaactgcagtgtgaaaacagtgctgcagactcaagctctttatgtgggctgtgcaatgctttcttctcagaagacacagtgtaaacaccaactggcatccatatcttctccagtggtgacatctttactcattaacctgggaagccccgtaaaagaagttcgtagggctgccattcagtgtctccaggccctcagtggagtggcatccccgttttatctgataatagatcatttgatttctaaagcagaggagatcacttcagatgctgcctatgttattcaggatttggctactttatttgaggaactacagagagaaaagaaactgaaatctcatcagaagttgtctgaaactttgaaaaacttacttagttgtgtgtatagttgcccatcttatatagcaaaagatttgatgaaagtacttcagggagtcaacggtgagatggtgctttctcagctattgcctatggctgaacaactgctagaaaagatccagaaggagcccacagctgtgctgaaagatgaggccatggttctgcatctcactctgggaaagtataatgaattttcagtttcccttttaaatgaggatccgaagagtctagatatatttataaaagctgtgcacacaacaaaggaactttacgcgggaatgccaaccattcagatcacagcccttgaaaagattacaaaaccattttttgcagccatatcagatgaaaaagttcagcagaagcttttaagaatgttgtttgatttattggtgaactgtaaaaactcacattgtgctcagactgtcagcagtgtttttaaagggatttccgttaatgctgaacaagtccgaatagaactggagccaccagataaagctaaacccttgggcacagttcagcaaaaaagaaggcaaaaaatgcagcagaaaaaatcacaagatctagaatctgttcaggaagttggaggttcttactggcaaagagtaactctcatcctggaattactgcagcacaaaaagaagctcagaagtcctcagatattggtgccaactctttttaacttgctatcaagatgtttagaacccttgccacaagagcagggaaatatggaatacaccaaacaattaattcttagttgtctgctcaacatctgccaaaaactatctccagatggtggcaaaatacccaaagatattttagatgaggagaagttcaacgtggagttgatagttcagtgcatccgcctttcggagatgccgcagacccatcaccatgcccttttacttttgggcactgttgctggaatatttccggataaagttttacacaatatcatgtctatttttacatttatgggagccaatgtcatgcgcctagatgatacttacagttttcaagttattaacaagacagtgaaaatggttattcccgcacttattcagtctgatagtggagattctatagaagtttcaagaaacgttgaagagattgtggtaaaaatcattagtgtatttgtggatgcgctgccacacgtcccggagcacaggcgcctgcccatccttgttcaacttgttgatacactgggtgcagagaaattcctctggattctcctcatcttgctttttgaacagtatgtcacaaaaacagtgctggcggctgcctatggcgaaaaggatgctattttagaagcagacactgaattttggttttcagtctgttgtgagtttagtgtccagcatcagatacaaagcttgatgaatatcctccagtacttactaaagctgccagaggaaaaagaagaaaccattcccaaagcagtgtcatttaataagagtgaatcacaagaagaaatgctacaggtttttaatgtagagactcacactagcaagcaactgcggcattttaaatttttgtcagtgtccttcatgtctcagctcctgtcttccaataattttctgaaaaaggtagttgagagtggtggtcctgagattttaaaaggccttgaagagaggttgctggagaccgttctcggctatatcagtgcagttgcacagtccatggaaaggaacgcagacaaactcaccgtgaagttctggcgcgcgctccttagtaaagcttacgacctgttagataaggtcaatgccttgctgcccacagagacattcattcctgtgatcagagggctggtgggcaatcccctgccatctgttcgccgcaaagcgctggaccttttgaataacaagctgcagcaaaatatatcctggaagaagacaatagttacccgtttcctaaaactggttccagaccttttggccattgtgcagcgtaagaaaaaggaaggggaagaagaacaagcaatcaacagacagacagcgttgtataccttaaagcttttatgcaagaattttggtgcagaaaatccagatccttttgtcccagtgctgaacactgctgtgaaactgattgctccagagagaaaggaggagaagaatgtcctgggaagcgcgctgctgtgcatagcagaggtgacctccaccctggaggcgctggccatcccccagcttcccagcctgatgccatcgttgctgacaacaatgaagaacaccagcgagctggtctccagcgaggtctacctgctcagtgccttggctgctctgcagaaggttgtggagactctcccgcacttcatcagcccctatctggaaggcattctctcccaggtgattcatctggagaaaatcactagtgaaatgggttctgcgtcacaggctaatatccgtctcacatctcttaaaaagacactggctaccacacttgcaccccgagtcctgttgcccgccatcaaaaaaacttacaagcagattgagaagaactggaagaatcacatgggtccgtttatgagcatcttgcaagagcatattggggtgatgaagaaggaagagctcacctcccatcagtctcagctaaccgcctttttcctggaagccctggacttccgagcccagcactctgagaacgatctggaggaagttggaaaaacggaaaattgtatcattgactgtctagtagccatggttgtcaaactttccgaggtcacattcaggcccctgttcttcaagctgtttgattgggctaaaacagaagatgccccaaaggacaggttgttgacattttacaacttggcagattgcattgctgaaaagctgaaagggctttttactctgtttgccggccacttagtgaagccttttgctgacaccttgaaccaggtgaacatctccaaaacagatgaagcattttttgactctgaaaatgaccctgaaaagtgctgcttgctgttgcagtttattttgaactgtttatacaaaatcttcctttttgatacccagcattttataagtaaagagagagcagaagccttgatgatgcctctggtggatcagctggaaaacaggcttgggggagaagagaaattccaggaacgggtgacaaagcacctgataccatgcatcgcacagttttcggtggccatggcggatgactctctttggaaaccactgaactaccagattctgctaaagacgagagactcctcgcctaaggttcgatttgctgctttgattactgtgttagcactggctgaaaaactaaaggagaattatattgtcttgctaccagaatccattcctttcttagcagagttgatggaagatgaatgtgaagaagtagaacatcagtgccaaaagactattcagcaactggaaactgtcctgggagagccactccagagctatttctaa

SEQ ID NO: 1324 - DNA, 618 bp, homo sapiens
atggccgagccgctccagccagaccccggggcggccgaggacgcggcggcccaagctgtggagacgccgggctggaaggccccggaggacgccggcccccagcccggaagttatgagatccgacactatggaccagccaagtgggtcagcacgtccgtggagtctatggactgggattcagccatccagacgggctttacgaaactgaacagctacattcaaggcaaaaacgagaaagagatgaaaataaagatgacagctccagtgacaagctacgtggagcctggttcaggtccttttagtgagtctaccattaccatttccctgtatattccctctgaacagcaatttgatccacccaggcctttagagtcagatgtcttcattgaagatagagccgaaatgactgtgtttgtacggtctttcgatggattttctagtgcccaaaagaatcaagaacaacttttgacattagcaagcattttaagggaagatggaaaagttttcgatgagaaggtttactacactgcaggctacaacagtcctgtcaaattgcttaatagaaataatgaagtgtggttgattcaaaaaaatgaacccaccaaagaaaacgaatga

SEQ ID NO: 1325 - DNA, 1161 bp, homo sapiens
atggggcagcgcgagatgtggaggctcatgtcgaggtttaatgcattcaaaaggactaataccatactgcaccatttgagaatgtccaagcacacagatgcagcagaagaggtgctattggaaaaaaaaggttgcacgggagtcataacactaaacagaccaaagttcctcaatgcactgactcttaatatgattcggcagatttatccacagctaaagaagtgggaacaagatcctgaaactttcctgatcattataaagggagcaggaggaaaggctttctgtgccgggggtgatatcagagtgatctcggaagctgaaaaggcaaaacagaagatagctccagttttcttcagagaagaatatatgctgaataatgctgttggttcttgccagaaaccttatgttgcacttattcatggaattacaatgggtgggggagttggtctctcagtccatgggcaatttcgagtggctacagaaaagtgtctttttgctatgccagaaactgcaataggactgttccctgatgtgggtggaggttatttcttgccacgactccaaggaaaacttggttacttccttgcattaacaggattcagactaaaaggaagagatgtgtacagagcaggaattgctacacactttgtagattctgaaaagttggccatgttagaggaagatttgttagccttgaaatctccttcaaaagaaaatattgcatctgtcttagaaaattaccatacagagtctaagattgatcgagacaagtcttttatacttgaggaacacatggacaaaataaacagttgtttttcagccaatactgtggaagaaattattgaaaacttacagcaagatggttcatcttttgccctagagcaattgaaggtaattaataaaatgtctccaacatctctaaagatcacactaaggcaactcatggaggggtcttcaaagaccttgcaagaagtactaactatggagtatcggctaagtcaagcttgtatgagaggtcatgactttcatgaaggcgttagagctgttttaattgataaagaccagagtccaaaatggaaaccagctgatctaaaagaagttactgaggaagatttgaataatcactttaagtctttgggaagcagtgatttgaaattttga

SEQ ID NO: 1326 - DNA, 3030 bp, homo sapiens
atgtcctggatgttcaagagggatccagtttggaagtacttgcagactgtccagtatggagttcatggaaattttccacgcctctcatatccaactttctttccacgttttgaattccaagatgttatccctccagatgactttctaactagtgatgaagaagtagattccgttttatttggaagtttgagaggtcatgtggttggactacgctattacacgggagtagttaataataatgaaatggttgcattacaacgagatcctaataacccttatgataagaatgcaattaaagtaaacaatgtgaatggaaatcaagttggccatttaaagaaagagcttgcaggtgctttggcctatatcatggacaacaaattggcacaaattgaaggggtagttccttttggtgcaaacaatgcttttaccatgcctctgcatatgactttttggggaaaagaagaaaatagaaaagcggtttcagatcagttgaagaaacatggatttaaattgggtcctgcaccaaaaactttaggattcaatttggaaagtggttggggctctggaagagctggaccaagctatagtatgccagtgcatgctgcagtacagatgacaactgaacagcttaaaacagaatttgacaaattgtttgaagatttaaaagaagatgataaaacccatgaaatggaaccagctgaggctattgaaacaccactgcttccacatcaaaaacaagctctagcttggatggtgtcacgggaaaatagcaaagaacttccaccattctgggaacagcgaaatgacttatactataacacaataacaaatttttctgagaaggaccgaccagaaaatgtccatggaggaattttagctgatgatatgggtttgggtaaaactcttacggccattgcagtaatccttaccaacttccatgatggcagacctcttcctattgaaagagttaaaaagaatctactgaagaaggaatataatgttaacgatgactctatgaaacttggaggaaacaataccagtgaaaaggcagatggactaagcaaagacgcatctagatgtagtgaacaacccagtatttcagatatcaaggagaagagtaagtttcgcatgtcagaattgtctagctcccgccccaaaagaagaaaaactgctgtccagtacatagaaagcagtgattcagaggaaattgaaacaagtgaattgccgcagaaaatgaaaggcaaactgaaaaatgtacagtctgaaactaaaggcagggcgaaagcaggatcttctaaggttatagaagatgtggcatttgcatgtgcattaacttcatctgttcctacaacaaaaaagaaaatgttgaaaaagggagcttgtgcagtggaggggtcaaagaaaactgatgttgaggagagaccaagaacaacactgatcatctgtccgctttctgtgttaagcaactggattgaccagtttggacaacatataaaatcagatgtacacttgaatttttatgtttattatggtcctgatcgtattagagaaccggccttactttcaaaacaggatattgttttgactacgtataatattttaactcatgactatggaactaaaggagatagtccattacatagcataaggtggctaagagtgatcctggatgaaggacatgccatacgaaatccaaatgctcagcagacaaaagctgtacttgacttagaatcagaaagaagatgggttttgacaggtactccaatccagaattctttaaaggacttgtggtctcttctttcctttttaaaacttaaaccatttattgatagagaatggtggcatagaacaatacagcgtcctgtcacaatgggagatgaaggaggacttaggcgtttacagtccctaattaaaaatattacacttagaagaacaaagacaagcaaaattaaaggaaaacctgttttggagttaccagaacgtaaagtatttattcagcacattacactttcagatgaagagagaaagatttatcagtctgtgaaaaatgaaggcagagccactattggaaggtattttaatgaagggactgtcctggcacattatgcagatgtcctgggtcttttgcttagactgcggcaaatttgttgccatacttaccttcttacaaatgcagtgtcttccaatggcccctcaggaaatgatacacctgaagaactgagaaagaagttaataaggaagatgaagttaattctgagctcaggttcagatgaggaatgtgcaatttgcctggattctttaacagttcctgtgataacacattgtgcacatgtattttgtaaaccctgtatttgccaagtcattcagaatgagcagccacatgctaaatgccctttatgcagaaatgatatacatgaagataatttattagaatgtcctccagaagaattagcacgtgacagtgagaaaaagtctgatatggaatggacatccagttcaaagattaatgcgctaatgcacgcattgactgacttaagaaagaagaatcccaacataaaaagtttggttgtttctcagtttacaacattcctgtctttaatagaaataccacttaaagcctctggatttgtgtttactcgtttggatggttccatggcccaaaagaaaagagttgaatcaattcagtgttttcaaaacactgaagcaggatctccaactataatgcttctgtccttaaaagcaggtggagttggtttgaatctgtctgcagcttctcgagtgtttttaatggatccagcctggaatcctgctgctgaagatcagtgctttgacagatgccatagacttggtcagaagcaagaagttatcatcacaaaattcattgtaaaggactctgttgaagaaaatatgctgaaaatacaaaacaaaaagagagaacttgcagcaggagcctttggaactaaaaaaccaaatgctgacgaaatgaaacaagccaaaattaatgaaatcagaacattaattgacttataa

SEQ ID NO: 1327 - DNA, 1173 bp, homo sapiens
atgccagatactaatagcacaatcaatttatcactaagcactcgtgttactttagcattttttatgtccttagtagcttttgctataatgctaggaaatgctttggtcattttagcttttgtggtggacaaaaaccttagacatcgaagtagttatttttttcttaacttggccatctctgacttctttgtgggtgtgatctccattcctttgtacatccctcacacgctgttcgaatgggattttggaaaggaaatctgtgtattttggctcactactgactatctgttatgtacagcatctgtatataacattgtcctcatcagctatgatcgatacctgtcagtctcaaatgctgtgtcttatagaactcaacatactggggtcttgaagattgttactctgatggtggccgtttgggtgctggccttcttagtgaatgggccaatgattctagtttcagagtcttggaaggatgaaggtagtgaatgtgaacctggatttttttcggaatggtacatccttgccatcacatcattcttggaattcgtgatcccagtcatcttagtcgcttatttcaacatgaatatttattggagcctgtggaagcgtgatcatctcagtaggtgccaaagccatcctggactgactgctgtctcttccaacatctgtggacactcattcagaggtagactatcttcaaggagatctctttctgcatcgacagaagttcctgcatcctttcattcagagagacagaggagaaagagtagtctcatgttttcctcaagaaccaagatgaatagcaatacaattgcttccaaaatgggttccttctcccaatcagattctgtagctcttcaccaaagggaacatgttgaactgcttagagccaggagattagccaagtcactggccattctcttaggggtttttgctgtttgctgggctccatattctctgttcacaattgtcctttcattttattcctcagcaacaggtcctaaatcagtttggtatagaattgcattttggcttcagtggttcaattcctttgtcaatcctcttttgtatccattgtgtcacaagcgctttcaaaaggctttcttgaaaatattttgtataaaaaagcaacctctaccatcacaacacagtcggtcagtatcttcttaa

SEQ ID NO: 1328 - DNA, 3060 bp, homo sapiens
atgcggtaccggctagcgtggcttctgcaccccgcactgcccagcaccttccgctcagtcctcggcgcccgcctgccgcctccggagcgcctgtgtggtttccaaaaaaagacttacagcaaaatgaataatccagccatcaagagaataggaaatcacattaccaagtctcctgaagacaagcgagaatatcgagggctagagctggccaatggtatcaaagtacttcttatcagtgatcccaccacggataagtcatcagcagcacttgatgtgcacataggttcattgtcggatcctccaaatattgctggcttaagtcatttttgtgaacatatgctttttttgggaacaaagaaataccctaaagaaaatgaatacagccagtttctcagtgagcatgcaggaagttcaaatgcctttactagtggagagcataccaattactattttgatgtttctcatgaacacctagaaggtgccctagacaggtttgcacagttttttctgtgccccttgttcgatgaaagttgcaaagacagagaggtgaatgcagttgattcagaacatgagaagaatgtgatgaatgatgcctggagactctttcaattggaaaaagctacagggaatcctaaacaccccttcagtaaatttgggacaggtaacaaatatactctggagactagaccaaaccaagaaggcattgatgtaagacaagagctactgaaattccattctgcttactattcatccaacttaatggctgtttgtgttttaggtcgagaatctttagatgacttgactaatctggtggtaaagttattttctgaagtagagaacaaaaatgttccattgccagaatttcctgaacaccctttccaagaagaacatcttaaacaactttacaaaatagtacccattaaagatattaggaatctctatgtgacatttcccatacctgaccttcagaaatactacaaatcaaatcctggtcattatcttggtcatctcattgggcatgaaggtcctggaagtctgttatcagaacttaagtcaaagggctgggttaatactcttgttggtgggcagaaggaaggagcccgaggttttatgttttttatcattaatgtggacttgaccgaggaaggattattacatgttgaagatataattttgcacatgtttcaatacattcagaagttacgtgcagaaggacctcaagaatgggttttccaagagtgcaaggacttgaatgctgttgcttttaggtttaaagacaaagagaggccacggggctatacatctaagattgcaggaatattgcattattatcccctagaagaggtgctcacagcggaatatttactggaagaatttagacctgacttaatagagatggttctcgataaactcagaccagaaaatgtccgggttgccatagtttctaaatcttttgaaggaaaaactgatcgcacagaagagtggtatggaacccagtacaaacaagaagctataccggatgaagtcatcaagaaatggcaaaatgctgacctgaatgggaaatttaaacttcctacaaagaatgaatttattcctacgaattttgagattttaccgttagaaaaagaggcgacaccataccctgctcttattaaggatacagctatgagcaaactttggttcaaacaagatgataagttttttttgccgaaggcttgtctcaactttgaatttttcagcccatttgcttatgtggaccccttgcactgtaacatggcctatttgtaccttgagctcctcaaagactcactcaacgagtatgcatatgcagcagagctagcaggcttgagctatgatctccaaaataccatctatgggatgtatctttcagtgaaaggttacaatgacaagcagccaattttactaaagaagattattgagaaaatggctacctttgagattgatgaaaaaagatttgaaattatcaaagaagcatatatgcgatctcttaacaatttccgggctgaacagcctcaccagcatgccatgtactacctccgcttgctgatgactgaagtggcctggactaaagatgagttaaaagaagctctggatgatgtaacccttcctcgccttaaggccttcatacctcagctcctgtcacggctgcacattgaagcccttctccatggaaacataacaaagcaggctgcattaggaattatgcagatggttgaagacaccctcattgaacatgctcataccaaacctctccttccaagtcagctggttcggtatagagaagttcagctccctgacagaggatggtttgtttatcagcagagaaatgaagttcacaataactgtggcatcgagatatactaccaaacagacatgcaaagcacctcagagaatatgtttctggagctcttctgtcagattatctcggaaccttgcttcaacaccctgcgcaccaaggagcagttgggctatatcgtcttcagcgggccacgtcgagctaatggcatacagggcttgagattcatcatccagtcagaaaagccacctcactacctagaaagcagagtggaagctttcttaattaccatggaaaagtccatagaggacatgacagaagaggccttccaaaaacacattcaggcattagcaattcgtcgactagacaaaccaaagaagctatctgctgagtgtgctaaatactggggagaaatcatctcccagcaatataattttgacagagataacactgaggttgcatatttaaagacacttaccaaggaagatatcatcaaattctacaaggaaatgttggcagtagatgctccaaggagacataaggtatccgtccatgttcttgccagggaaatggattcttgtcctgttgttggagagttcccatgtcaaaatgacataaatttgtcacaagcaccagccttgccacaacctgaagtgattcagaacatgaccgaattcaagcgtggtctgccactgtttccccttgtgaaaccacatattaacttcatggctgcaaaactctga

SEQ ID NO: 1329 - DNA, 7476 bp, homo sapiens
atgggggccgccgccggccggagcccccacctggggcccgcgcccgcccgccgcccgcagcgctctctgctcctgctgcagctgctgctgctcgtcgctgccccggggtccacgcaggcccaggccgccccgttccccgagctgtgcagttatacatgggaagctgttgataccaaaaataatgtactttataaaatcaacatctgtggaagtgtggatattgtccagtgcgggccatcaagtgctgtttgtatgcacgacttgaagacacgcacttatcattcagtgggtgactctgttttgagaagtgcaaccagatctctcctggaattcaacacaacagtgagctgtgaccagcaaggcacaaatcacagagtccagagcagcattgccttcctgtgtgggaaaaccctgggaactcctgaatttgtaactgcaacagaatgtgtgcactactttgagtggaggaccactgcagcctgcaagaaagacatatttaaagcaaataaggaggtgccatgctatgtgtttgatgaagagttgaggaagcatgatctcaatcctctgatcaagcttagtggtgcctacttggtggatgactccgatccggacacttctctattcatcaatgtttgtagagacatagacacactacgagacccaggttcacagctgcgggcctgtccccccggcactgccgcctgcctggtaagaggacaccaggcgtttgatgttggccagccccgggacggactgaagctggtgcgcaaggacaggcttgtcctgagttacgtgagggaagaggcaggaaagctagacttttgtgatggtcacagccctgcggtgactattacatttgtttgcccgtcggagcggagagagggcaccattcccaaactcacagctaaatccaactgccgctatgaaattgagtggattactgagtatgcctgccacagagattacctggaaagtaaaacttgttctctgagcggcgagcagcaggatgtctccatagacctcacaccacttgcccagagcggaggttcatcctatatttcagatggaaaagaatatttgttttatttgaatgtctgtggagaaactgaaatacagttctgtaataaaaaacaagctgcagtttgccaagtgaaaaagagcgatacctctcaagtcaaagcagcaggaagataccacaatcagaccctccgatattcggatggagacctcaccttgatatattttggaggtgatgaatgcagctcagggtttcagcggatgagcgtcataaactttgagtgcaataaaaccgcaggtaacgatgggaaaggaactcctgtattcacaggggaggttgactgcacctacttcttcacatgggacacggaatacgcctgtgttaaggagaaggaagacctcctctgcggtgccaccgacgggaagaagcgctatgacctgtccgcgctggtccgccatgcagaaccagagcagaattgggaagctgtggatggcagtcagacggaaacagagaagaagcattttttcattaatatttgtcacagagtgctgcaggaaggcaaggcacgagggtgtcccgaggacgcggcagtgtgtgcagtggataaaaatggaagtaaaaatctgggaaaatttatttcctctcccatgaaagagaaaggaaacattcaactctcttattcagatggtgatgattgtggtcatggcaagaaaattaaaactaatatcacacttgtatgcaagccaggtgatctggaaagtgcaccagtgttgagaacttctggggaaggcggttgcttttatgagtttgagtggcacacagctgcggcctgtgtgctgtctaagacagaaggggagaactgcacggtctttgactcccaggcagggttttcttttgacttatcacctctcacaaagaaaaatggtgcctataaagttgagacaaagaagtatgacttttatataaatgtgtgtggcccggtgtctgtgagcccctgtcagccagactcaggagcctgccaggtggcaaaaagtgatgagaagacttggaacttgggtctgagtaatgcgaagctttcatattatgatgggatgatccaactgaactacagaggcggcacaccctataacaatgaaagacacacaccgagagctacgctcatcacctttctctgtgatcgagacgcgggagtgggcttccctgaatatcaggaagaggataactccacctacaacttccggtggtacaccagctatgcctgcccggaggagcccctggaatgcgtagtgaccgacccctccacgctggagcagtacgacctctccagtctggcaaaatctgaaggtggccttggaggaaactggtatgccatggacaactcaggggaacatgtcacgtggaggaaatactacattaacgtgtgtcggcctctgaatccagtgccgggctgcaaccgatatgcatcggcttgccagatgaagtatgaaaaagatcagggctccttcactgaagtggtttccatcagtaacttgggaatggcaaagaccggcccggtggttgaggacagcggcagcctccttctggaatacgtgaatgggtcggcctgcaccaccagcgatggcagacagaccacatataccacgaggatccatctcgtctgctccaggggcaggctgaacagccaccccatcttttctctcaactgggagtgtgtggtcagtttcctgtggaacacagaggctgcctgtcccattcagacaacgacggatacagaccaggcttgctctataagggatcccaacagtggatttgtgtttaatcttaatccgctaaacagttcgcaaggatataacgtctctggcattgggaagatttttatgtttaatgtctgcggcacaatgcctgtctgtgggaccatcctgggaaaacctgcttctggctgtgaggcagaaacccaaactgaagagctcaagaattggaagccagcaaggccagtcggaattgagaaaagcctccagctgtccacagagggcttcatcactctgacctacaaagggcctctctctgccaaaggtaccgctgatgcttttatcgtccgctttgtttgcaatgatgatgtttactcagggcccctcaaattcctgcatcaagatatcgactctgggcaagggatccgaaacacttactttgagtttgaaaccgcgttggcctgtgttccttctccagtggactgccaagtcaccgacctggctggaaatgagtacgacctgactggcctaagcacagtcaggaaaccttggacggctgttgacacctctgtcgatgggagaaagaggactttctatttgagcgtttgcaatcctctcccttacattcctggatgccagggcagcgcagtggggtcttgcttagtgtcagaaggcaatagctggaatctgggtgtggtgcagatgagtccccaagccgcggcgaatggatctttgagcatcatgtatgtcaacggtgacaagtgtgggaaccagcgcttctccaccaggatcacgtttgagtgtgctcagatatcgggctcaccagcatttcagcttcaggatggttgtgagtacgtgtttatctggagaactgtggaagcctgtcccgttgtcagagtggaaggggacaactgtgaggtgaaagacccaaggcatggcaacttgtatgacctgaagcccctgggcctcaacgacaccatcgtgagcgctggcgaatacacttattacttccgggtctgtgggaagctttcctcagacgtctgccccacaagtgacaagtccaaggtggtctcctcatgtcaggaaaagcgggaaccgcagggatttcacaaagtggcaggtctcctgactcagaagctaacttatgaaaatggcttgttaaaaatgaacttcacggggggggacacttgccataaggtttatcagcgctccacagccatcttcttctactgtgaccgcggcacccagcggccagtatttctaaaggagacttcagattgttcctacttgtttgagtggcgaacgcagtatgcctgcccacctttcgatctgactgaatgttcattcaaagatggggctggcaactccttcgacctctcgtccctgtcaaggtacagtgacaactgggaagccatcactgggacgggggacccggagcactacctcatcaatgtctgcaagtctctggccccgcaggctggcactgagccgtgccctccagaagcagccgcgtgtctgctgggtggctccaagcccgtgaacctcggcagggtaagggacggacctcagtggagagatggcataattgtcctgaaatacgttgatggcgacttatgtccagatgggattcggaaaaagtcaaccaccatccgattcacctgcagcgagagccaagtgaactccaggcccatgttcatcagcgccgtggaggactgtgagtacacctttgcctggcccacagccacagcctgtcccatgaagagcaacgagcatgatgactgccaggtcaccaacccaagcacaggacacctgtttgatctgagctccttaagtggcagggcgggattcacagctgcttacagcgagaaggggttggtttacatgagcatctgtggggagaatgaaaactgccctcctggcgtgggggcctgctttggacagaccaggattagcgtgggcaaggccaacaagaggctgagatacgtggaccaggtcctgcagctggtgtacaaggatgggtccccttgtccctccaaatccggcctgagctataagagtgtgatcagtttcgtgtgcaggcctgaggccaggccaaccaataggcccatgctcatctccctggacaagcagacatgcactctcttcttctcctggcacacgccgctggcctgcgagcaagcgaccgaatgttccgtgaggaatggaagctctattgttgacttgtctccccttattcatcgcactggtggttatgaggcttatgatgagagtgaggatgatgcctccgataccaaccctgatttctacatcaatatttgtcagccactaaatcccatgcacggagtgccctgtcctgccggagccgctgtgtgcaaagttcctattgatggtccccccatagatatcggccgggtagcaggaccaccaatactcaatccaatagcaaatgagatttacttgaattttgaaagcagtactccttgcttagcggacaagcatttcaactacacctcgctcatcgcgtttcactgtaagagaggtgtgagcatgggaacgcctaagctgttaaggaccagcgagtgcgactttgtgttcgaatgggagactcctgtcgtctgtcctgatgaagtgaggatggatggctgtaccctgacagatgagcagctcctctacagcttcaacttgtccagcctttccacgagcacctttaaggtgactcgcgactcgcgcacctacagcgttggggtgtgcacctttgcagtcgggccagaacaaggaggctgtaaggacggaggagtctgtctgctctcaggcaccaagggggcatcctttggacggctgcaatcaatgaaactggattacaggcaccaggatgaagcggtcgttttaagttacgtgaatggtgatcgttgccctccagaaaccgatgacggcgtcccctgtgtcttccccttcatattcaatgggaagagctacgaggagtgcatcatagagagcagggcgaagctgtggtgtagcacaactgcggactacgacagagaccacgagtggggcttctgcagacactcaaacagctaccggacatccagcatcatatttaagtgtgatgaagatgaggacattgggaggccacaagtcttcagtgaagtgcgtgggtgtgatgtgacatttgagtggaaaacaaaagttgtctgccctccaaagaagttggagtgcaaattcgtccagaaacacaaaacctacgacctgcggctgctctcctctctcaccgggtcctggtccctcgtccacaacggagtctcgtactatataaatctgtgccagaaaatatataaagggcccctgggctgctctgaaagggccagcatttgcagaaggaccacaactggtgacgtccaggtcctgggactcgttcacacgcagaagctgggtgtcataggtgacaaagttgttgtcacgtactccaaaggttatccgtgtggtggaaataagaccgcatcctccgtgatagaattgacctgtacaaagacggtgggcagacctgcattcaagaggtttgatatcgacagctgcacttactacttcagctgggactcccgggctgcctgcgccgtgaagcctcaggaggtgcagatggtgaatgggaccatcaccaaccctataaatggcaagagcttcagcctcggagatatttattttaagctgttcagagcctctggggacatgaggaccaatggggacaactacctgtatgagatccaactttcctccatcacaagctccagaaacccggcgtgctctggagccaacatatgccaggtgaagcccaacgatcagcacttcagtcggaaagttggaacctctgacaagaccaagtactaccttcaagacggcgatctcgatgtcgtgtttgcctcttcctctaagtgcggaaaggataagaccaagtctgtttcttccaccatcttcttccactgtgaccctctggtggaggacgggatccccgagttcagtcacgagactgccgactgccagtacctcttctcttggtacacctcagccgtgtgtcctctgggggtgggctttgacagcgagaatcccggggacgacgggcagatgcacaaggggctgtcagaacggagccaggcagtcggcgcggtgctcagcctgctgctggtggcgctcacctgctgcctgctggccctgttgctctacaagaaggagaggagggaaacagtgataagtaagctgaccacttgctgtaggagaagttccaacgtgtcctacaaatactcaaaggtgaataaggaagaagagacagatgagaatgaaacagagtggctgatggaagagatccagctgcctcctccacggcagggaaaggaagggcaggagaacggccatattaccaccaagtcagtgaaagccctcagctccctgcatggggatgaccaggacagtgaggatgaggttctgaccatcccagaggtgaaagttcactcgggcaggggagctggggcagagagctcccacccagtgagaaacgcacagagcaatgcccttcaggagcgtgaggacgatagggtggggctggtcaggggtgagaaggcgaggaaagggaagtccagctctgcacagcagaagacagtgagctccaccaagctggtgtccttccatgacgacagcgacgaggacctcttacacatctga

SEQ ID NO: 1330 - DNA, 3999 bp, homo sapiens
atgcgaaatctgaaattatttcggaccctggagttcagggatattcaaggtccagggaatcctcagtgcttctctctccgaactgaacaggggacggtgctcattggttcagaacatggcctgatagaagtagaccctgtctcaagagaagtgaaaaatgaagtttctttggtggcagaaggctttctcccagaggatggaagtggccgcattgttggtgttcaggacttgctggatcaggagtctgtgtgtgtggccacagcctctggagacgtcatactctgcagtctcagcacacaacagctggagtgtgttgggagtgtagccagtggtatctctgttatgagttggagtcctgaccaagagctggtgcttcttgccacaggtcaacagaccctgattatgatgacaaaagattttgagccaatcctggagcagcagatccatcaggatgattttggtgaaagcaagtttatcactgttggatggggtaggaaggagacacagttccatggatcagaaggcagacaagcagcttttcagatgcaaatgcatgagtctgctttgccctgggatgaccatagaccacaagttacctggcggggggatggacagttttttgctgtgagtgttgtttgcccagaaacaggggctcggaaggtcagagtgtggaaccgagagtttgctttgcagtcaaccagtgagcctgtggcaggactgggaccagccctggcttggaaaccctcaggcagtttgattgcatctacacaagataaacccaaccagcaggatattgtgttttttgagaaaaatggactccttcatggacactttacacttcccttccttaaagatgaggttaaggtaaatgacttgctctggaatgcagattcctctgtgcttgcagtctggctggaagaccttcagagagaagaaagctccattccgaaaacctgtgttcagctctggactgttggaaactatcactggtatctcaagcaaagtttatccttcagcacctgtgggaagagcaagattgtgtctctgatgtgggaccctgtgaccccataccggctgcatgttctctgtcagggctggcattacctcgcctatgattggcactggacgactgaccggagcgtgggagataattcaagtgacttgtccaatgtggctgtcattgatggaaacagggtgttggtgacagtcttccggcagactgtggttccgcctcccatgtgcacctaccaactgctgttcccacaccctgtgaatcaagtcacattcttagcacaccctcaaaagagtaatgaccttgctgttctagatgccagtaaccagatttctgtttataaatgtggtgattgtccaagtgctgaccctacagtgaaactgggagctgtgggtggaagtggatttaaagtttgccttagaactcctcatttggaaaagagatacaaaatccagtttgagaataatgaagatcaagatgtaaacccgctgaaactaggccttctcacttggattgaagaagacgtcttcctggctgtaagccacagtgagttcagcccccggtctgtcattcaccatttgactgcagcttcttctgagatggatgaagagcatggacagctcaatgtcagttcatctgcagcggtggatggggtcataatcagtctatgttgcaattccaagaccaagtcagtagtattacagctggctgatggccagatatttaagtacctttgggagtcaccttctctggctattaaaccatggaagaactctggtggatttcctgttcggtttccttatccatgcacccagaccgaattggccatgattggagaagaggaatgtgtccttggtctgactgacaggtgtcgctttttcatcaatgacattgaggttgcgtcaaatatcacgtcatttgcagtatatgatgagtttttattgttgacaacccattcccatacctgccagtgtttttgcctgagggatgcttcatttaaaacattacaggccggcctgagcagcaatcatgtgtcccatggggaagttctgcggaaagtggagaggggttcacggattgtcactgttgtgccccaggacacaaagcttgtattacagatgccaaggggaaacttagaagttgttcatcatcgagccctggttttagctcagattcggaagtggttggacaaacttatgtttaaagaggcatttgaatgcatgagaaagctgagaatcaatctcaatctgatttatgatcataaccctaaggtgtttcttggaaatgtggaaaccttcattaaacagatagattctgtgaatcatattaacttgttttttacagaattgaaagaagaagatgtcacgaagaccatgtaccctgcaccagttaccagcagtgtctacctgtccagggatcctgacgggaataaaatagaccttgtctgcgatgctatgagagcagtcatggagagcataaatcctcataaatactgcctatccatacttacatctcatgtaaagaagacaaccccagaactggaaattgtactgcaaaaagtacacgagcttcaaggaaatgctccctctgatcctgatgctgtgagtgctgaagaggccttgaaatatttgctgcatctggtagatgttaatgaattatatgatcattctcttggcacctatgactttgatttggtcctcatggtagctgagaagtcacagaaggatcccaaagaatatcttccatttcttaatacacttaagaaaatggaaactaattatcagcggtttactatagacaaatacttgaaacgatatgaaaaagccattggccacctcagcaaatgtggacctgagtacttcccagaatgcttaaacttgataaaagataaaaacttgtataacgaagctctgaagttatattcaccaagctcacaacagtaccaggatatcagcattgcttatggggagcacctgatgcaggagcacatgtatgagccagcggggctcatgtttgcccgttgcggtgcccacgagaaagctctctcagcctttctgacatgtggcaactggaagcaagccctctgtgtggcagcccagcttaactttaccaaagaccagctggtgggcctcggcagaactctggcaggaaagctggttgagcagaggaagcacattgatgcggccatggttttggaagagtgtgcccaggattatgaagaagctgtgctcttgctgttagaaggagctgcctgggaagaagctttgaggctggtatacaaatataacagactggatattatagaaaccaacgtaaagccttccattttagaagcccagaaaaattatatggcatttctggactctcagacagccacattcagtcgccacaagaaacgtttattggtagttcgagagctcaaggagcaagcccagcaggcaggtctggatgatgaggtaccccacgggcaagagtcagacctcttctctgaaactagcagtgtcgtgagtggcagtgagatgagtggcaaatactcccatagtaactccaggatatcagcgagatcatccaagaatcgccgaaaagcggagcggaagaagcacagcctcaaagaaggcagtccgctggaggacctggccctcctggaggcactgagtgaagtggtgcagaacactgaaaacctgaaagatgaagtataccatattttaaaggtactctttctctttgagtttgatgaacaaggaagggaattacagaaggcctttgaagatacgctgcagttgatggaaaggtcacttccagaaatttggactcttacttaccagcagaattcagctaccccggttctaggtcccaattctactgcaaatagtatcatggcatcttatcagcaacagaagacttcggttcctgttcttgatgctgagctttttataccaccaaagatcaacagaagaacccagtggaagctgagcctgctagactga

SEQ ID NO: 1331 - DNA, 3117 bp, homo sapiens
atggaccccaacaccattatcgaggccctgcggggcactatggacccagccctgcgtgaggccgcggagcgccagctcaatgaagcacacaagtctctgaattttgtctcaacactgctccagattactatgtcggaacagctggatttacctgtgagacaggcaggtgttatctatctgaaaaatatgataacacagtattggcctgatcgagaaacagcaccaggggatatatccccttatactattccagaagaagatcgccattgtattcgagaaaatattgtagaagccattatccattctcctgagctcatcagggtacagcttactacatgcattcatcacatcatcaaacatgattatccaagccgctggactgccattgtggacaaaattggcttttatcttcagtccgataacagtgcttgttggctaggaattcttctttgcctttatcagcttgtgaaaaattatgagtataaaaaaccagaggagcggagtccattggtagcagcaatgcagcattttctgccagttctaaaggatcgttttatccagcttctttctgaccagtctgatcagtctgtcctcatccagaaacagatattcaagatcttctatgctcttgttcagtatacactaccactggaactgataaaccaacagaacctgacagaatggatagaaattttaaagactgttgtgaacagggatgtacctaatgaaacacttcaagttgaagaagatgatcgacctgagttaccatggtggaaatgcaagaagtgggccttacatattttagcaagactttttgaaagatatggaagccctggcaatgtttccaaggagtataatgaatttgctgaagtatttctgaaggcatttgctgttggtgtccagcaagttttattgaaggtgttatatcagtacaaggagaagcaatatatggctcctcgagttttacaacagacattaaattatattaatcaaggagtttctcatgctctcacctggaagaatctgaagccccatatacaaggcattatccaagatgttatttttccattgatgtgctatacagatgctgatgaggaactttggcaagaagacccttacgaatatatacgcatgaagtttgatgtgtttgaagatttcatttctcctaccactgctgcccagacacttttgtttacagcctgtagtaagaggaaagaggtactgcaaaagactatgggattttgttaccagattcttacagaaccaaatgctgaccctcgaaaaaaagatggagccctgcatatgattggctctttagctgaaatacttctgaagaaaaagatctataaagatcagatggaatacatgttgcagaatcatgtattccctctcttcagcagtgaactaggctacatgagagcaagggcttgctgggtacttcactatttttgtgaagtgaagttcaaaagtgatcagaaccttcaaacagccttagagctaacaagaagatgtctgattgatgatagagaaatgcctgtgaaagtggaagctgccattgcccttcaagtattgatcagcaatcaagaaaaagctaaagaatatatcacaccattcatcagacctgtaatgcaggctcttcttcacattataagagaaacagaaaatgatgaccttaccaatgtaattcagaaaatgatctgtgaatatagtgaagaagttactcctattgcagtagaaatgacacaacatttggcaatgacatttaaccaagtaatccagacggggccagatgaagaaggtagtgatgacaaagcagttactgctatgggaattctgaatacaattgatacacttcttagtgtagttgaagatcataaagagataacccaacagcttgagggaatctgcttacaggtcattggtactgttttacaacagcatgtcttagaattctatgaggagatcttctctttagcgcacagtttgacatgtcaacaagtgtctccacagatgtggcagctactaccccttgtatttgaagtctttcagcaagatggctttgattactttacagatatgatgcccctccttcataattatgtaacagttgatacagacacacttctgtctgacaccaagtatcttgaaatgatatacagtatgtgcaaaaaggttcttacaggagttgcaggagaagatgcagagtgtcatgcagcaaaattgttagaggtcatcattctgcagtgcaaagggcgtggcattgaccagtgcattcccttattcgtggaagcagccttagaaagactgacaagagaggttaagacaagtgaacttcgaactatgtgtctgcaagttgcaattgcagctttgtattataatccacacctactactcaataccttagaaaatcttcgcttccctaataatgttgaaccagttacaaatcattttattacacagtggcttaatgatgttgactgtttcttggggcttcatgacagaaagatgtgtgttctcggactctgtgctcttattgatatggaacagataccccaagttttaaatcaggtttctggacagattttgccggcttttatccttttatttaacggattgaaaagagcatatgcctgccatgcagaacatgagaatgacagtgatgatgatgatgaagctgaagatgatgatgaaaccgaggaactggggagtgatgaagatgatattgatgaagatgggcaagaatatttggagattctggctaagcaggctggtgaagatggagatgatgaagattgggaagaagatgatgctgaagagactgctctggaaggctattccacaatcattgatgatgaagataaccctgttgatgagtatcagatatttaaagctatctttcaaactattcaaaatcgtaatcctgtgtggtatcaggcactgactcacggtcttaatgaagaacaaagaaaacagttacaggacatagcaactctggctgatcaaagaagagcagcccatgaatccaaaatgattgagaagcatggaggatacaaattcagtgctccagttgtgccaagttctttcaattttggaggcccagcaccagggatgaattga

SEQ ID NO: 1332 - DNA, 1797 bp, homo sapiens
atgaagccaacaggtacagacccaaggatcttatctatagctgctgaagttgcaaaaagccctgagcagaatgtccctgttatactgttgaagttaaaagaaataataaacatcacacctttaggaagctcagagttgaagaaaatcaaacaagatatatattgttatgatctcattcaatattgcctcttggtcctcagtcaagattattctcgaatccagggtggttggactacaatttcccagcttacacagatattaagccattgctgtgtgggcttggagccaggagaagatgcagaggaattttacaatgaattacttccatcagctgcagaaaattttctagttttggggagacaattacaaacatgttttatcaatgcagctaaggctgaagaaaaagatgaattactacactttttccaaattgtgactgattctctcttctggcttttgggaggccatgttgaacttattcagaatgtactacaaagtgatcatttcttacatttactgcaagctgacaatgtccaaataggatctgcagtcatgatgatgctacagaatatactacagatcaacagtggtgatttactcagaataggaagaaaagccctgtattcaattttagatgaagttattttcaagcttttttcaactcctagtccagttataagaagtactgctacaaaactcctactgttgatggctgaatcccatcaggaaattttgattttactgagacaaagtacctgctacaaaggactcagacgtctactaagtaaacaggaaactgggactgaattcagtcaagaacttagacagcttgttggccttttaagcccaatggtctatcaggaagtagaagagcagaaactacatcaagcagcatgcttgattcaagcctattggaagggttttcagacaagaaagagattaaagaagcttccatctgctgtgattgctttgcagaggagtttcagatccaaacgatcaaagatgttgctggagataaataggcagaaggaagaagaggacctcaaattacaattgcaacttcaaagacagagagccatgagactttcccgagaattgcagctgagtatgctcgaaatagttcatccaggtcaggtggagaaacactatcgggaaatggaagagaaatcagcactgattatccagaaacattggagagggtacagggaaaggaaaaattttcaccaacagaggcagtctctcatagagtataaagcagctgtcacacttcaaagagcagcgcttaaattcctagcgaagtgccgtaagaaaaagaaactatttgctccttggcgaggactccaagaactcactgatgcacgccgagttgaactgaagaaacgagtggatgactatgtcagaagacatttgggctctccaatgtcagatgtggtcagtagggagctccatgcccaagctcaagaacgactgcaacactactttatgggcagggccctagaagagcgagcccagcagcacagagaagctctgatagcacagatcagcaccaacgttgaacagctaatgaaggcaccaagtctgaaggaggcagaagggaaagaacctgagctcttcctaagtagatccaggcctgtggcagccaaggccaagcaggcccatctcacaaccctgaagcacatacaagcaccctggtggaagaagcttggagaagaatctggagatgagattgatgttccaaaggatgagcttagtatagaattagaaaatttattcattggtggaaccaaaccaccttag

SEQ ID NO: 1333 - DNA, 2892 bp, homo sapiens; identical to SEQ ID NO: 329

SEQ ID NO: 1334 - DNA, 1146 bp, homo sapiens
atgtcccgacatgaaggtgtcagctgtgatgcatgtttaaaaggaaattttcgaggtcgcagatataagtgtttaatttgctacgattacgatctttgtgcatcttgttatgaaagtggtgcaacaacaacaaggcatacaactgaccacccaatgcagtgcatattaacaagggtagattttgatttatactatggtggggaagctttctctgtagagcagccacagtcttttacttgtccctattgtggaaaaatgggctatacggagacatctcttcaagaacatgttacttctgaacatgcagaaacatcaacagaagtgatttgtccaatatgtgcagcgttacctggaggcgatcctaatcatgtcacggatgactttgcagctcatcttacacttgaacacagagcccctagagatttagatgaatcgagtggtgttcgacatgtacgtagaatgtttcaccctggccggggattaggaggtcctcgtgctcgtagatcaaacatgcactttactagcagttctactggtggactttcttcttctcagagttcatattctccaagcaatagggaagccatggatcctatagctgagcttttatctcagttatcaggagtgagacgttctgcaggaggacagcttaattcctctggcccttccgcttctcagttacaacaactgcagatgcagctgcagctagaacggcagcatgcccaggcagcacggcaacaactggagaccgcacgcaacgcaacccggcgtactaacacaagcagtgtcaccactacaatcacacaatccacagcaacaaccaacatagctaatacagaaagcagtcagcagactctacagaattcccagtttcttttaacaaggttgaatgatcctaaaatgtctgaaacggagcgccagtccatggaaagcgagcgtgcagaccgcagcctgtttgtccaagagctccttctgtccactttagtgcgtgaagagagctcatcctcagatgaggatgatcggggggagatggcagattttggtgctatgggctgtgtagatattatgcctttagatgttgctttagaaaacctaaatttaaaagagagtaataaaggaaatgagcctccaccacctcctctttga

SEQ ID NO: 1335 - DNA, 1752 bp, homo sapiens
atgactttctatttgtttggtattcgaagctttccgaagctttggaagagcccataccttgggctaggcccagggcactcttatgtctcgctgtttctggcagaccgctgtggcatcaggaaccagcagaggttgttttctcttaaaacaatgtctccacagaataccaaagcaacgaatctgattgccaaggccagatatctcaggaaagatgagggcagtaataagcaagtttattctgttcctcatttttttttagctggagcagctaaggagagatcacagatgaattctcaaactgaagatcatgccttggcacctgtgaggaacactattcaactcccaacacaacctttgaattcagaggagtgggataaacttaaggaagatttaaaagaaaacaccggaaagaccagtttcgaaagttggatcatttcacagatggctggctgtcatagctctatagatgtggctaaatctctgctggcatgggtagcagccaaaaataatggtattgtaagttacgatttactggtcaagtatttgtatctctgtgtctttcatatgcagacatctgaagttattgatgtctttgaaattatgaaagccagatataagactttagaacctagaggttacagtcttctcatccggggattgatccattcagacagatggagagaagcattgttgctgttagaggacatcaaaaaagttataactccttcaaaaaagaactataatgactgtatccagggagctctccttcatcaagatgtaaacacagcttggaatttatatcaggaattgctaggtcatgatattgttcctatgttggaaactttaaaagctttctttgattttggaaaagacataaaggatgataactattcaaataaactactagatattctttcatatctaagaaataatcagctgtatccaggggagtcatttgcacacagtataaaaacatggtttgagagtgttcctggaaaacaatggaaaggacaattcaccacagtccgaaaaagtggccagtgttcgggctgtggaaaaaccatagagtctattcagctgagtccagaagaatatgaatgtcttaagggaaaaatcatgagggatgtgatagatggaggtgaccagtacagaaagacaacacctcaggaacttaagagatttgagaacttcataaaatctcgtcctccttttgatgttgtcattgatggtctcaatgttgccaaaatgtttcctaaagttcgtgaatctcaacttctcttgaatgtcgtctctcaactagccaaacggaatctgcgactgctggtcctaggccggaagcacatgctaagacggagttcccagtggagtcgggatgagatggaagaggtgcaaaagcaagccagctgtttttttgctgatgacatctcggaggatgatccattccttctgtatgccacactgcactccgggaatcactgcaggtttatcacaagagacctgatgcgggaccacaaggcctgtctgcctgatgccaagacccaacgcctgttttttaagtggcagcagggacatcagctggcaattgtaaataggtttccaggatcaaaactaacctttcagcgtattctcagctatgacacagtggtgcaaacaactggagactcgtggcacataccatatgatgaagacttggtagaaagatgttcctgtgaagtaccaaccaaatggctttgcctccaccaaaagacatag

SEQ ID NO: 1336 - DNA, 1830 bp, homo sapiens
atggaaggaaagccaatgcgcaggtgtaccaacattcgaccaggagagactggaatggatgtaacaagccgctgcacccttggagaccccaacaaactgccagaaggggttccccaacctgcccgcatgccctatatctcagacaagcaccctcgacaaaccttggaagtgattaaccttctgagaaagcaccgggagctatgtgatgtggtgctagttgtgggcgccaagaagatatatgcccatcgagtcattttgtcagcctgtagtccctacttccgagctatgtttacaggagaattggcagagagccgtcagacagaagtagtgatccgagacattgacgagagggctatggaattactgattgactttgcgtatacctcccagataacagtagaagagggcaatgttcagactcttctgccagctgcttgcctcctccagctggcagaaatacaggaagcctgctgtgaattcttaaagagacaattagatccttctaactgcctgggcattcgggcttttgctgacacacattcatgtcgtgagttgctaaggatagcagacaagttcacccaacataactttcaagaggtaatggagagtgaagagttcatgttgcttccagccaatcaactcattgatataatatccagtgatgagctaaacgttcgcagtgaagaacaagtgttcaatgcagtgatggcctgggtcaaatacagtattcaggaaagacgtcctcaattaccccaggtgctgcagcatgttcgtttgcctttgcttagtcccaagttcctggtcggcacagtaggctctgatcccctcatcaaaagtgatgaagaatgcagagacttggtagatgaggctaaaaactacctcctattgccgcaagaacgaccactaatgcaaggaccaaggacgagaccacggaaacctatccgatgtggggaagtactctttgcagttggtggttggtgcagtggagatgccatttccagtgttgaacgatatgatccacagaccaatgaatggagaatggtggcttcaatgagcaaaaggagatgcggagttggggtcagtgttcttgatgatctgttatatgcagtaggaggccatgatggatcctcttatctcaatagtgttgaaaggtatgaccccaaaacaaaccagtggagcagtgatgtggcccctacaagcacctgcaggacaagtgttggtgtagcagtacttggaggctttctttatgctgtgggtggccaggatggtgtgtcttgcctcaacattgttgagaggtatgatccgaaggagaacaagtggactcgggtagcttctatgagtaccagaagactaggtgtggctgtggctgtgttaggagggttcttatatgctgtaggtggctctgacgggacatctcctctcaacacagtggaacgttacaatcctcaggaaaacagatggcacactatagcccctatggggacccggaggaaacacctaggctgtgcagtatatcaggacatgatctatgctgtaggaggtagagatgacactacagagctgagcagtgctgagagatacaaccccagaaccaaccagtggtctccagtggtggccatgacatcacgccgtagtggagttggcctggcagtggtcaatggacagctcatggcagtaggaggttttgatggcacaacatacttgaagaccatagaagtttttgatcctgatgccaatacatggaggttatatggcgggatgaattaccgtcggctagggggtggcgtaggagttattaaaatgacacattgtgaatcccatatttggtga

SEQ ID NO: 1337 - DNA, 1803 bp, homo sapiens
atggtactaatattgggacgcagactaaacagagaggatcttggggtgcgtgattccccagcaactaagcgaaaagtttttgaaatggaccccaaatctctgacaggtcatgagttttttgacttctcttcaggatcatcccatgccgaaaacatactccagatatttaatgaatttcgtgatagccgcttattcacagatgttatcatttgtgtggaaggaaaagaatttccttgccatagagctgtgctctcagcctgtagcagctacttcagagctatgttttgtaatgaccacagggaaagccgagaaatgttggttgagatcaatggtattttagctgaagctatggaatgttttttgcagtatgtttatactggaaaggtgaagatcactacagagaatgtacagtatctctttgagacatcaagcctctttcagattagtgttctccgtgatgcatgtgccaagttcttggaggagcaacttgatccttgtaattgcttaggaatccagcgctttgctgatacccattcactcaaaacactcttcacaaaatgcaaaaattttgcgttacagacttttgaggatgtatcccagcacgaagaatttcttgagcttgacaaagatgaacttattgattatatttgtagtgatgaacttgttattggtaaagaggagatggtttttgaagccgtcatgcgttgggtctatcgtgccgttgatctgagaagaccactgttacacgagctcctgacacatgtgagactccctctgttgcatcccaactactttgttcaaacagttgaagtggaccaattgatccagaattctcctgagtgttatcagttgttgcatgaagcaagacggtaccacatacttgggaatgaaatgatgtccccaaggactaggccacgcaggtccactggctattctgaggtgatagttgtcgttggaggatgtgagcgagttggaggatttaatcttccatacactgagtgctacgatcctgtaacaggagaatggaagtctttggctaagcttccagaatttaccaaatcagagtatgcagtctgtgctctaaggaatgacattcttgtttcaggtggaagaatcaacagccgtgatgtctggatttataactcacagttaaatatttggatcagagttgcctctctcaataaaggcagatggcgtcacaaaatggctgtcctccttggtaaagtatatgttgtcggtggctatgatgggcaaaacagacttagcagcgtagaatgttatgattccttttcaaatcgatggactgaagttgctccccttaaggaagccgtgagttctcctgcagtgactagctgtgtaggcaaactgtttgtgattggtggaggacctgatgataatacttgttctgataaggttcaatcttatgatccagaaaccaattcttggctacttcgtgcagctatcccaattgccaaaaggtgtataacagctgtatccctaaacaacctgatctatgttgccggtggactgaccaaggcaatatactgttacgatccagttgaagattactggatgcacgtacagaatacattcagccgtcaggaaaactgtggtatgtctgtgtgtaatggtaaaatatatatcctgggcggaagacgggaaaatggagaagccacagacactattctctgttatgatcctgcaacaagtatcatcacaggggtagctgcaatgcccaggccagtgtcctatcatggctgtgtgactattcatagatacaatgagaaatgctttaaactctga

SEQ ID NO: 1338 - DNA, 2211 bp, homo sapiens
atgggaaatccagaaaacatagaagatgcatatgttgctgttattcgtccaaagaatactgccagtctcaattctcgggaatacagagctaagtcatatgaaattttgttgcatgaagttcccattgaaggacagaaaaaaaagagaaagaaagttttattggaaacgaaacttcaaggcaacagtgaaataacacaaggcatattggattacgtagtagaaaccaccaaaccaatttctcctgcaaaccagggtatcagaggaaaacgagttgtactaatgaaaaaatttcctctggatggagagaagatgggcagagaagcatcattatttattgttccatcagttgtcaaagataatactaaatacacatataccccaggatgcccaattttttactgcttacaagatattatgcgagtctgtagtgaatccagtactcattttgctacacttacagcaaggatgttaatagccttggataagtggttagatgaacgtcatgcacaatctcactttattccagctttattccgaccttctcctcttgagcggataaaaactaatgtcataaatcctgcatatgctactgaatcaggtcagacagaaaactcactacatatgggctatagtgcactagaaataaagagtaaaatgttagccctagagaaagcagatacctgtatttacaaccctttgtttggatcagatcttcagtatacaaatcgggtagataaagtggtaataaatccatactttggtctaggagctccagactactcaaaaatccaaatacctaaacaggaaaaatggcagagaagcatgagcagtgtcacagaagacaaggaacgacagtgggtagatgattttcctctccaccgaagcgcctgtgaaggagattcagaattactaagccgtcttctcagtgaaagattttcagtcaaccagttagatagtgaccactgggcacccattcattatgcatgctggtatggaaaagttgaggccactcgcatattgttagagaaaggaaagtgcaatccaaaccttttaaatggacaacttagttctcctcttcattttgctgctggaggaggacatgctgaaatagtacagattctcctaaaccacccagaaacggatagacatataacagaccaacaaggaagatctccattaaatatttgtgaagaaaacaaacaaaacaactgggaagaagctgcaaaattgttgaaggaagcaattaacaaaccatatgaaaaagttcgaatatacagaatggatgggtcatatcgttctgttgaattgaagcatggaaataataccacagtgcagcagataatggaaggaatgcgtctctctcaagaaactcagcaatatttcactatatggatttgttcagaaaacctcagccttcaactcaaaccatatcataaacccttgcaacatgttcgtgactggccagaaatacttgctgaattgactaatctggatcctcaaagggaaacacctcagctttttctaagaagagatgtgagacttcccttggaagttgaaaaacagattgaagacccactagctattcttattctctttgatgaagccagatataatttattgaagggcttttatacagctcctgatgctaagctgataacattggcaagtctgcttttgcaaatagtctatggaaattatgagagtaaaaaacacaagcaaggtttcctaaatgaagaaaatctaaaatccatcgtacctgttaccaaactgaaaagtaaggcacctcactggacaaatcgcatacttcatgaatacaagaatctcagtacaagtgaaggtgtcagtaaagaaatgcatcaccttcagcgcatgttcttacagaattgctgggaaattcctacttatggagcagcatttttcacaggacagatatttacaaaggcaagccccagcaatcataaagtcatccctgtgtatgtaggagtgaatataaaaggacttcatctcctcaacatggaaactaaggctttactcatcagtcttaagtatggttgttttatgtggcaattgggagatactgatacttgttttcagatccatagcatggaaaataaaatgagctttatagtacatacaaaacaggctggtctcgtggtaaaactgttaatgaagctaaatggacagttaatgcccactgaaagaaattcatga

SEQ ID NO: 1339 - DNA, 1200 bp, homo sapiens
atggctcaaagggccttcccgaatccttatgctgattataacaaatccctggccgaaggctactttgatgctgccgggaggctgactcctgagttctcacaacgcttgaccaataagattcgggagcttcttcagcaaatggagagaggcctgaaatcagcagaccctcgggatggcaccggttacactggctgggcaggtattgctgtgctttacttacatctttatgatgtatttggggaccctgcctacctacagttagcacatggctatgtaaagcaaagtctgaactgcttaaccaagcgctccatcaccttcctttgtggggatgcaggccccctggcagtggccgctgtgctatatcacaagatgaacaatgagaagcaggcagaagattgcatcacacggctaattcacctaaataagattgatcctcatgctccaaatgaaatgctctatgggcgaataggctacatctatgctcttctttttgtcaataagaactttggagtggaaaagattcctcaaagccatattcagcagatttgtgaaacaattttaacctctggagaaaacctagctaggaagagaaacttcacggcaaagtctccactgatgtatgaatggtaccaggaatattatgtaggggctgctcatggcctggctggaatttattactacctgatgcagcccagccttcaagtgagccaagggaagttacatagtttggtcaagcccagtgtagactacgtctgccagctgaaattcccttctggcaattaccctccatgtataggtgataatcgagatctgcttgtccattggtgccatggcgcccctggggtaatctacatgctcatccaggcctataaggtattcagagaggaaaagtatctctgtgatgcctatcagtgtgctgatgtgatctggcaatatgggttgctgaagaagggatatgggctgtgccacggttctgcagggaatgcctatgccttcctgacactctacaacctcacacaggacatgaagtacctgtatagggcctgtaagtttgctgaatggtgcttagagtatggagaacatggatgcagaacaccagacacccctttctctctctttgaaggaatggctggaacaatatatttcctggctgacctgctagtccccacaaaagccaggttccctgcatttgaactctga

SEQ ID NO: 1340 - DNA, 3060 bp, homo sapiens
atgctttggagggtgcttttgtcaaagaggcctcctttccctcacccagagctggatttccaagaggctcccatacctagctgccctggcagactcccagggaggaaaaacagcgtggccttggcagctgccccgaggaaggagcccacaggtgacagggagaagccattgccattccctgtcctggcccccttcagcaaccctgaacactctgctccagccaaggtggtgagggcagctgttcctaaacagcgcaaaggcagcaaggttggtgactttggagatgcaatcaattggcccacacctggagagatagcccacaagagtgttcagccacagtcccacaagcctcagcctacccgtaaactgccacccaagaaggacatgaaggaacaggagaaaggagaagggagtgatagtaaggagagtccaaaaaccaaatcagatgaatcaggggaggaaaagaatggagatgaggattgccagcgaggcgggcagaagaagaaaggaaacaaacacaagtgggttccattacaaatagacatgaagcctgaagtgcccagagagaaactggcttcacgccccactcgcccaccggagcctagacacatacctgccaatcgcggagagatcaaagggtctgagtctgccacctacgtgcccgtggccccccccaccccagcctggcaaccagagatcaaaccggagcctgcctggcacgaccaggatgagacatcgagtgtgaagagtgatggggctggtggggcgcgggcttccttccgtggccgtggacgggggcgtggtcgcggccggggacgcggccggggtggcactcgaacccattttgactaccagtttggctaccgaaagtttgatggtgtggaggggcctcgtacgcccaagtacatgaacaacatcacctactactttgacaatgtcagcagcaccgagctttacagtgtggatcaggaactgctcaaagactacatcaagcgccagattgaatactacttcagcgtggacaatttagagcgagacttcttcctgcgaaggaaaatggatgctgatggtttcctacccatcacccttattgcttccttccaccgagtgcaggcccttaccactgacatttcactcatctttgcggccctaaaggacagcaaggtggtggagatcgttgatgagaaagttcgtaggagggaggaaccagaaaagtggcctcttcccccaatagtggattattcacagactgatttctcccagcttctcaactgccctgaatttgttccccgtcagcactaccaaaaggagacagagtcggcacctggctctcctcgtgcagtcaccccagtgccaaccaaaacagaggaggtcagcaacctaaagacactacccaagggcctgtctgccagcctgcctgacctggattctgagaactggattgaagtgaagaagaggcctcggccatccccagcacggcccaagaagtcagaggagtccagattttcccacctgacctctctgcctcagcagctgccttcccagcagctgatgtccaaggatcaggatgagcaagaggaactggattttctgtttgacgaggagatggagcagatggatgggcggaagaacaccttcactgcctggtctgatgaggaatctgactatgagattgatgacagggatgtcaacaagatcctcattgtcacccagacaccacattacatgcgccggcacccagggggggaccgcacaggcaaccacacctcgcgtgccaagatgagcgccgaactggccaaggtcattaatgatggcctcttctactatgagcaggacctgtgggctgaaaagtttgaacctgagtattcccagatcaagcaagaagtcgagaacttcaaaaaggtcaatatgatcagccgggagcagtttgacacactgacccctgagccccctgtggatcccaaccaggaagttcctcctgggccacctcggttccagcaagttcctacggatgccctggccaacaagttgtttggtgctcctgagccctccaccatcgcccgctctctaccaaccactgtcccagagtcaccaaactaccgcaacaccaggacccctcgcactccccggacaccacagctcaaagactcaagccagacatcacggttttacccagtggtgaaagaaggacggacactggatgccaagatgcctcgaaaaagaaagacaagacacagttcaaacccacccttggagagccatgtgggctgggtgatggattcccgtgagcacaggccccgtactgcttccatcagctccagcccctcagaagggacgcctacagttggcagctatggctgtacccctcagtcattgcccaagttccagcatccttcccatgaactgctcaaggaaaatggcttcacacaacacgtctaccataagtatcgtaggcgctgccttaatgagcggaaacgcttgggcattggccagtctcaggagatgaacacactcttccgcttctggtccttcttcctccgagatcacttcaacaaaaagatgtatgaggagttcaagcagctggctctggaggacgccaaagaaggctacagatatggtttggagtgcctttttcgatactacagttatggcctggaaaagaagttccggctggacatattcaaggattttcaggaggaaacggtgaaggactatgaagctggccaactgtatgggctggagaagttctgggccttcttgaaatattccaaagccaaaaatttggacattgaccccaaactgcaagaatacctcggcaaattccgacgtcttgaagacttccgagtagatccccccatgggtgaggagggcaaccacaagcgacactcagtggtagcaggaggtggcggcggtgagggcaggaagcggtgcccctcccagtcttccagcaggcctgctgccatgatcagccaaccccctacaccacccaccggccagcctgtccgggaagatgccaaatggacaagccagcactcgaacacacagactttgggaaagtga

SEQ ID NO: 1341 - DNA, 2175 bp, homo sapiens
atgttgcttttcgtggagcaggtagcatctaaaggaactggtttaaatcctaatgccaaagtatggcaagaaattgctcctggaaatactgatgccaccccagtaactcatggaactgaaagctcttggcatgaaatagcagctacatcaggtgctcatcctgagggtaatgcagagctctcagaagatatatgtaaagaatatgaagtaatgtattcttcatcttgtgaaaccacaagaaatactacaggcattgaagaatcaactgatgggatgattttaggaccagaagatctgagttaccaaatatatgatgtttccggagaaagcaattcagcagtttctacagaagacctaaaagaatgtctgaagaaacaattagaattctgtttttcacgagaaaatttgtcaaaggatctttacttgatatctcaaatggatagtgatcagttcatcccaatttggacagttgccaacatggaagaaataaaaaagttgactacagaccctgatctaattcttgaagtgttaagatcttctcccatggtacaagttgatgagaagggtgagaaagtgagaccaagtcataagcgttgtattgtaattcttagagagattcctgaaacaacaccaatagaggaagtgaaaggtttgttcaaaagtgaaaactgccccaaagtgataagctgtgagtttgcacacaatagcaactggtatatcactttccagtcagacacagatgcacaacaggcttttaaatacttaagagaagaagttaaaacatttcagggcaagccaattatggcaaggataaaagccatcaatacattttttgctaagaatggttatcgattaatggattctagtatctatagtcaccccattcaaactcaagcacagtatgcctccccagtctttatgcagcctgtatataatcctcaccaacagtactcggtctatagtattgtgcctcagtcttggtctccaaatcctacaccttactttgaaacaccactggctccctttcccaatggtagttttgtgaatggctttaattcgccaggatcttataaaacaaatgctgctgctatgaatatgggtcgaccattccaaaaaaatcgtgtgaagcctcagtttaggtcatctggtggttcagaacactcaacagagggctctgtatccttgggggatggacagttgaacagatatagttcaagaaactttccagctgaacggcataaccccacagtaactgggcatcaggagcaaacttaccttcagaaggagacttccactttgcaggtggaacagaatggggactatggtaggggcaggagaactctcttcagaggtcgaagacgacgagaagatgacaggatctcaagacctcatccttcaacagctgaatcaaaggctccaacaccaaagtttgacttattagcctcaaattttccacctttacctggaagttcatcaagaatgccaggtgaactcgttttggagaataggatgtctgatgttgttaaaggtgtctacaaagaaaaggataatgaagagttgacaattagttgcccagtgcctgcagatgagcagacagaatgcacttctgcccagcaactcaatatgagtaccagttctccatgtgctgctgagcttactgcattaagcacaactcagcaagaaaaggatctaatagaagattcctctgttcagaaggatggtctcaatcagacaactataccagtttctcctccaagtactacaaagccatcgagggcaagtactgcttcaccatgtaataataacataaatgcagctacagctgtggctctacaggaaccccgaaagttaagttatgctgaagtgtgccagaagccccctaaagagccatcttcagttcttgtgcagccactacgggaacttcgctccaatgtggtgtctcccaccaaaaatgaagacaatggagctcctgagaactccgttgagaaaccacatgagaagccagaagcaagggctagtaaggattattctggcttccgaggcaatataatccccaggggagcagcaggaaaaatcagggaacagagacgccagtttagccatagggctatacctcagggagtgactcgacgtaatggcaaagagcaatatgtgccacccagatcaccaaagtaa

SEQ ID NO: 1342 - DNA, 2577 bp, homo sapiens
atgtttacccttgcggaagttgcatcacttaatgacattcagccaacttaccgaatcctgaaaccatggtgggatgtgtttatggattacctagctgttgttatgttaatggtagccatctttgcaggaaccatgcaacttaccaaagatcaggtggtctgtttgccagtattgccatctcctgtaaattcaaaggcacatacaccaccaggaaatgccgaggtcaccaccaacatcccaaagatggaagcagccaccaaccaagaccaagatgggcggacaacaaacgacatttcctttgggacatctgctgtgacacctgacatacctctcagagccacatatcctcgcacagatttcgcacttccaaatcaggaggcaaagaaagagaagaaagatccaacaggtcgaaaaacaaacttggattttcagcaatatgtatttattaatcaaatgtgttaccatctggcccttccgtggtattctaagtactttccatacctagctcttatacatactattattctcatggtcagtagcaacttttggttcaaatatcccaaaacatgctcaaaagtagaacattttgtttcaatattaggaaagtgctttgaatccccttggacgacaaaagcgttgtctgagacagcatgcgaagactcagaggaaaacaagcagagaataacaggtgcccagactctaccaaagcatgtttctaccagcagtgatgaagggagccccagtgccagtacaccaatgatcaataaaactggctttaaattttcagctgagaagcctgtgattgaagttcccagcatgacaatcctggataaaaaggatggagagcaggccaaagccctgtttgagaaagtgaggaagttccgtgcccatgtggaagatagtgacttgatctataaactctatgtggtccaaacagttatcaaaacagccaagttcatttttattctctgctatacagcgaactttgtcaacgcaatcagctttgaacacgtctgcaagcccaaagttgagcatctgattggttatgaggtatttgagtgcacccacaatatggcttacatgttgaaaaagcttctcatcagttacatatccattatttgtgtttatggctttatctgcctctacactctcttctggttattcaggatacctttgaaggaatattctttcgaaaaagtcagagaagagagcagttttagtgacattccagatgtcaaaaacgattttgcgttccttcttcacatggtagaccagtatgaccagctatattccaagcgttttggtgtgttcttgtcagaagttagtgaaaataaacttagggaaattagtttgaaccatgagtggacatttgaaaaactcaggcagcacatttcacgcaacgcccaggacaagcaggagttgcatctgttcatgctgtcgggggtgcccgatgctgtctttgacctcacagacctggatgtgctaaagcttgaactaattccagaagctaaaattcctgctaagatttctcaaatgactaacctccaagagctccacctctgccactgccctgcaaaagttgaacagactgcttttagctttcttcgcgatcacttgagatgccttcacgtgaagttcactgatgtggctgaaattcctgcctgggtgtatttgctcaaaaaccttcgagagttgtacttaataggcaatttgaactctgaaaacaataagatgataggacttgaatctctccgagagttgcggcaccttaagattctccacgtgaagagcaatttgaccaaagttccctccaacattacagatgtggctccacatcttacaaagttagtcattcataatgacggcactaaactcttggtactgaacagccttaagaaaatgatgaatgtcgctgagctggaactccagaactgtgagctagagagaatcccacatgctattttcagcctctctaatttacaggaactggatttaaagtccaataacattcgcacaattgaggaaatcatcagtttccagcatttaaaacgactgacttgtttaaaattatggcataacaaaattgttactattcctccctctattacccatgtcaaaaacttggagtcactttatttctctaacaacaagctcgaatccttaccagtggcagtatttagtttacagaaactcagatgcttagatgtgagctacaacaacatttcaatgattccaatagaaataggattgcttcagaacctgcagcatttgcatatcactgggaacaaagtggacattctgccaaaacaattgtttaaatgcataaagttgaggactttgaatctgggacagaactgcatcacctcactcccagagaaagttggtcagctctcccagctcactcagctggagctgaaggggaactgcttggaccgcctgccagcccagctgggccagtgtcggatgctcaagaaaagcgggcttgttgtggaagatcacctttttgataccctgccactcgaagtcaaagaggcattgaatcaagacataaatattccctttgcaaatgggatttaa

SEQ ID NO: 1343 - DNA, 16293 bp, homo sapiens
atgtcttcctcagatgaagagacgctcagtgagcggtcatgtcggagtgagcggtcttgtcggagtgagcgatcttacaggagcgagcggtcggggagcctgtctccctgtcccccaggggacaccttgccctggaacctgccactgcatgagcagaaaaagcggaaaagccaggattcggtgctggaccctgcagagcgtgctgtggtcagagtcgctgatgaacgggaccgggttcagaagaaaacgttcaccaagtgggtcaacaagcacttaatgaaggtccgcaagcacatcaatgatctttatgaagatctgcgggatggccataacctgatctctctgttggaggtcctctcaggcatcaaactgccccgggagaagggcaggatgcgttttcataggctgcagaatgtgcagattgccctggacttcctaaagcagcgacaggtgaaactagtgaatattcgcaatgatgacatcacagatggcaaccccaagttgaccctgggtctgatctggaccattattttgcatttccagatctctgacatctacattagtggagaatcaggggatatgtcagccaaggagaaactactcctgtggacccagaaggtgacagctggttacacaggaatcaaatgcaccaacttttcctcctgctggagtgatgggaagatgttcaatgcactcattcaccgataccgacccgatctagtagacatggagagggtgcaaatccaaagtaaccgagagaatctggaacaggcttttgaagtggcagaaagactgggggtcactcgcctgctggatgcagaagatgtggatgtgccatctccagatgaaaagtctgtaatcacttatgtgtcttcgatttatgatgccttccctaaagttcctgagggtggagaagggatcagtgctacggaagtggactccaggtggcaagaataccaaagccgagtggactccctcattccctggatcaaacagcatacaatactgatgtcagataaaacttttccccaaaaccctgttgaactaaaggcactttataaccaatatatacacttcaaagaaacagaaattctggccaaggagagagaaaaaggaagaattgaggaattatataaattactagaggtgtggattgaatttggccgaattaaactgcctcaaggttatcaccctaatgatgtggaagaagagtggggaaagctcatcatagagatgctggaacgagagaaatcacttcggccggctgtggagaggctggaattgctgctacagattgcaaacaaaatccagaatggtgctttgaactgtgaagaaaaactgacactagctaagaatacactgcaggctgatgctgctcacctggaatcaggacaaccggtacaatgtgagtcagatgtcattatgtacattcaggagtgtgaaggtctcatcaggcagctgcaggtggatctccagatcctgcgggatgagaattactaccagctagaagagctggcttttagggtcatgcgtcttcaggatgagctggtcaccttgcgtctagagtgtacaaacctgtaccggaagggtcatttcacttcacttgaattggttccaccctctactttaaccaccactcatctgaaagcagaacccttaaccaaggcaacccattcttcttctacctcctggttccgaaagcctatgactcgggctgaacttgtggccatcagctcctctgaagatgaaggcaatctccgatttgtgtatgaactactgtcttgggtagaagagatgcagatgaaactggagcgagcagagtggggcaatgacctgcctagtgtggagttgcagctagaaacacagcagcacatccatacgagtgtagaagagctgggctcaagtgtcaaggaggccaggttgtatgagggaaagatgtcccagaatttccataccagctatgctgaaactcttggaaagctggagacacagtattgtaaattgaaggaaacttctagcttccggatgaggcaccttcagagcctgcataaatttgtttccagagctacagctgagttgatctggttgaatgagaaggaggaggaggaactagcatatgactggagtgacaacaattccaatatctcagccaagagaaattacttctctgagttgacaatggaactggaggagaaacaggatgtgtttcgttctctacaagatacagcagaactactttcacttgagaaccacccagccaagcagacagtggaggcttacagtgctgctgtccagtcccagttgcagtggatgaagcagctgtgcctgtgtgttgagcagcatgtgaaagagaatactgcttattttcagttcttcagtgatgcacgagagctggagtcattcttgaggaacctccaagattccattaaacgaaaatattcctgtgaccacaacaccagcttatcccgccttgaagacctgctccaggactccatggatgaaaaggagcagcttatacagtccaagagttccgttgccagtctcgttgggagatcaaaaaccatcgttcagctaaaaccacgcagtccagaccatgtgttaaagaacaccatttctgtcaaggctgtctgtgactacaggcagatcgagattactatttgcaaaaatgatgaatgtgtgctagaagataattctcagcggaccaaatggaaagtgatcagccccacagggaacgaggcaatggtgccgtcagtctgcttcctcatccccccacccaataaggatgccattgagatggccagcagggtcgaacaatcttatcagaaggttatggccctttggcatcagctgcatgttaacaccaaaagccttatctcttggaactatctgcgtaaagaccttgaccttgtacagacctggaacctagaaaagcttcgatcctcagcaccaggggagtgccatcagattatgaagaaccttcaggcccactatgaagactttctgcaggatagtcgtgactctgtgctgttctcagtggctgatcgcttgcgcttggaagaggaggtggaagcttgtaaagcccgcttccagcacctgatgaagtccatggagaatgaggacaaagaggagactgtggccaagatgtacatttcagagttgaagaacatccggctacgcctggaggagtatgaacagagggtggtcaaacgaattcagtctctagccagctctaggactgacagagatgcctggcaggacaatgcattaaggattgcagagcaagagcacacccaggaggatttacagcaattgaggtcagacttggatgcagtttctatgaaatgtgacagctttctccatcagtctccatctagttcaagtgtcccaactctgcgctcagaactgaatctgctggtggagaagatggaccatgtctatggtctctctactgtatatctgaataagttaaagacagttgatgttatagtacgtagcatacaggatgctgaactcttggtcaaaggttatgagattaagctgagtcaagaagaagtagtactggcagatctctcagctctggaggcccattggtcgacattacggcactggcttagtgatgtgaaggacaagaattcagtgttttcagtcctggatgaggaaattgccaaggccaaggtagtggcagagcagatgagtcgtctgacaccagagcgaaatctggatttggagcgctatcaggaaaaaggctcccagctgcaggagcgttggcaccgagtcattgcccagctcgagattcgccaatctgagctagaaagtatccaggaagttctgggagattaccgagcctgccatggaactctcatcaagtggattgaggaaaccactgcccagcaggaaatgatgaagccaggccaggcagaggatagcagagtgctttcggagcagctcagccagcagacggccctatttgcagaaattgagagaaatcagacaaaactggatcaatgtcaaaaattttcccagcagtactctactattgtaaaggactatgaattgcaactgatgacatacaaggcctttgtggaatcgcagcagaaatcccctggcaagcgccgtcgcatgctttcctcttcagatgccatcactcaagagttcatggacttaaggactcgctacacggcattggtgactttaacaactcagcacgtgaaatacatcagtgatgcactccggcgtctggaggaggaggagaaagtggtagaagaggagaaacaagaacatgtggagaaggttaaagaacttttgggctgggtgtctaccctagcgaggaatacacaaggaaaagctacctcatccgagaccaaagaatcaacagacattgaaaaagctattttggaacagcaggttctgtcagaagagctgacaacaaagaaagaacaagtctctgaagctattaaaacatcacagatcttcttggccaagcatggtcataagctctcagaaaaagagaagaaacaaatatctgagcaattgaatgccctaaacaaggcttaccatgacctttgtgatggttctgcaaatcagcttcagcagcttcagagccagttggctcaccagacagaacaaaagaccctgcagaaacaacaaaatacctgtcaccagcaactggaggatctttgcagttgggtaggacaggcagaaagagcactggcaggccaccaaggcagaaccacccagcaggatctctctgctttgcagaagaaccaaagtgacttgaaggatttacaggatgacattcagaatcgtgccacctcatttgccactgttgtcaaggacattgaggggttcatggaagagaatcagaccaagctgagcccacgtgagttgacagctcttcgggaaaagcttcatcaggctaaggagcaatatgaggcgctccaggaagagacacgtgtggcccagaaggaactggaggaagcagtgacctccgccttacagcaggagactgaaaagagtaaagcagcaaaggaactggcagagaacaagaagaagatcgatgctctcctggattgggtaacttcagtaggatcatctggtggacagctgctgaccaaccttccaggaatggagcagctctcgggagctagcttggagaaaggagccttggacaccactgatggttacatgggggtgaatcaagccccagagaaactggacaagcaatgtgagatgatgaaggcccgtcaccaagaattgctgtcccagcagcaaaatttcattctggccacccagtcagctcaggccttcttggatcagcatggccacaatctcacacctgaggagcaacagatgctgcaacagaagctgggagagctaaaggaacaatactctacttccctggcccaatcagaggcagaactgaagcaggtgcagacacttcaggatgagttgcagaaatttctgcaggatcataaagagtttgaaagctggttggaacgatccgagaaagagctggagaacatgcataagggaggcagcagccccgagacccttccctccctgctaaagcggcaaggaagcttctcagaggatgtcatttcccacaaaggagacttgagatttgtgactatctcaggacagaaagtcttggacatggaaaacagttttaaggaaggcaaagaaccatcagaaattggaaacttagtaaaggacaagttgaaggatgcaacagaaagatacactgctctccactcaaagtgtacacgattaggatctcacctgaatatgctgttaggccagtatcatcaattccaaaacagtgctgacagcctgcaggcctggatgcaggcttgtgaggccaacgtggagaagctcctctcagatactgttgcctctgaccctggagttctccaggagcagcttgcaacaacaaagcagttgcaggaggaattggctgagcaccaagtacctgtggaaaaactccaaaaagtagctcgtgacataatggaaattgaaggggagccagccccagaccacaggcatgttcaagaaactacagattccatactcagccacttccaaagcctctcctatagcctggctgagcgatcttctctgctgcagaaagcaattgcccaatctcagagtgtccaggaaagcctggagagcctgttgcagtctattggggaagttgaacaaaacctggaagggaagcaggtgtcatcactctcatcaggagtcatccaggaagccttagccacaaatatgaaattgaagcaggacattgctcggcaaaagagcagcttggaggccacccgtgagatggtgacccgattcatggagacagcagacagtactacagcagcagtgctgcagggcaaactggcagaggtgagccagcggttcgaacagctctgtctacagcagcaagaaaaggagagctccctaaagaagcttctaccccaggcagagatgtttgaacacctctctggtaagctgcagcagttcatggaaaacaaaagtcggatgctggcctctggaaatcagccagatcaagatattacacatttcttccaacagatccaggagctcaatttggaaatggaagaccaacaggagaacctagatactcttgagcacctggtcactgaactgagctcttgtggctttgcgctggacttgtgccagcatcaggacagggtacagaatctaagaaaagacttcacagagctacagaagacagttaaagagagagagaaagatgcatcatcttgccaggaacagttggatgaattccggaagctggtcaggaccttccagaaatggttgaaagaaactgaagggagtattccacctacggaaacttctatgagtgctaaagagttagaaaagcagattgaacacctgaagagtctactagatgactgggcaagtaagggaactctggtggaagaaatcaattgcaaaggtacttctttagaaaatctcatcatggaaatcacagcacctgattcccaaggcaagacaggttccatactgccctctgtaggaagctctgtaggcagtgtaaacggataccacacctgcaaagatctgacggagatccagtgtgacatgtcagatgtaaacttgaagtatgagaaactagggggagtacttcatgaacgccaggaaagccttcaggctatcctcaacagaatggaggaggttcacaaggaggcaaactctgtgctgcagtggctggaatcaaaagaggaagtcctgaaatccatggatgccatgtcatctccaaccaagacagaaacagtgaaagcccaagctgaatctaacaaggccttcctggctgagttggaacagaattctccaaaaattcaaaaagtaaaggaagccctggctggattactggtgacatatcccaactcacaggaagcagaaaattggaagaaaattcaggaagaactcaattcccgatgggaaagggccactgaggttactgtggctcggcaaaggcagctagaggaatctgcaagtcatctggcctgcttccaggctgcagaatcccagctccggccgtggctgatggagaaagaactgatgatgggagtgctggggcccctgtctattgaccccaacatgttgaatgcacaaaagcaacaggtccagtttatgctaaaggaatttgaagcacgcaggcaacagcatgagcaactgaatgaggcagctcagggcatcctaacaggccctggagatgtctctctgtccaccagccaagtacagaaagaactccagagcatcaatcagaaatgggttgagctgactgacaaactcaactcccgttccagccaaattgaccaagctattgttaagagcacccagtaccaggaactgctccaggacttatcagagaaggtgagggcagttggacaacggctgagtgtccagtcagctatcagcacccaaccagaggctgtaaagcagcaattggaagagaccagtgaaattcgatctgacttggagcagttagaccacgaggttaaggaggctcagacactgtgcgatgaactctcagtgctcattggtgagcagtacctcaaggatgaactgaagaagcgtttggagacagttgccctgcctctccaaggtttagaagaccttgcagccgatcgcattaacagactccaggcagctcttgccagcacccagcagttccagcaaatgtttgatgagttgaggacctggttggatgataaacaaagccagcaagcaaaaaactgcccaatttctgcaaaattggagcggctacagtctcagctacaggagaatgaagagtttcagaaaagtcttaatcaacacagtggctcctatgaggtgattgtggctgaaggggaatctctacttctttctgtacctcctggagaagagaaaaggactctacaaaaccagttggttgagctcaaaaaccattgggaagagcttagtaaaaaaactgcagacagacaatccaggctcaaggattgtatgcagaaagctcagaaatatcagtggcatgtggaagaccttgtgccatggatagaagattgtaaagctaagatgtctgagttgcgagtcactctggatccagtgcagctagagtccagtctcctaagatcaaaggctatgctgaatgaggtggagaagcgccgctccctgctggaaatattgaatagtgctgctgacattctgatcaattcttcagaagcagatgaggatggaatccgggatgagaaggctgggatcaaccagaacatggatgctgttacagaagagctgcaggccaaaacagggtcactcgaagaaatgactcagaggctcagggagttccaggaaagctttaagaatattgaaaagaaggttgaaggagccaaacaccaacttgagatctttgatgctctgggttctcaagcctgtagcaacaagaacctggagaagctaagagctcaacaggaagtgctgcaggccctagagcctcaggtagactatctgaggaactttactcagggtctggtagaagatgccccagatggatctgatgcttctcaacttctccaccaagctgaggtcgcccagcaagagttcctcgaagttaagcaaagagtgaacagtggttgtgtgatgatggaaaacaagctggaggggattggccagtttcactgccgggtccgagagatgttctctcaattggcagacctggatgatgagctagatggcatgggtgctattggcagagacactgatagcctccagtcccaaatcgaggatgtccggctattccttaacaaaattcacgtcctcaaattagacatagaggcctctgaagcagagtgtcgacatatgctagaagaagaggggactctggatttgttaggtctcaaaagggagctagaagccctgaacaaacagtgtggcaaactgacagagagggggaaagctcgtcaggaacagctggaactgacactaggccgtgtagaggacttctacaggaaattgaaaggactcaatgacgcgaccacagcagcagaggaggcagaggccctccagtgggtagtggggaccgaagtggaaatcatcaaccaacaattagcagattttaaaatgtttcagaaagaacaagtggatcctcttcagatgaaattgcagcaggtgaatggacttggccagggattaattcagagtgcaggaaaagactgtgatgtacagggtttagaacatgacatggaagagatcaatgctcgatggaatacattgaataaaaaggtcgcacaaagaattgcacagctacaggaagctttgttgcattgtgggaagtttcaagatgccttggagccattgctcagctggttggcagataccgaggagctcatagccaatcagaaacctccatctgctgagtataaagtggtgaaagcacagatccaagaacagaagttgctccagcggctcctagatgatcgaaaggccacagtagacatgcttcaagcagaaggaggcagaatagcccagtcagcagagctggctgatagagagaaaatcactggacagctggagagtcttgaaagtagatggactgaactactcagtaaggcagcagccaggcaaaaacagctggaagacatcctggttctggccaaacagttccatgagacagctgagcctatttctgacttcttatctgtcacagagaaaaagcttgctaactcagaacctgttggcactcagactgccaaaatacagcagcagatcattcggcacaaggctctggaagaagacatagaaaaccatgcaacagatgtgcaccaggcagtcaaaattgggcagtccctctcctccctgacatctcctgcagaacagggtgtgctgtcagaaaagatagactcattgcaggcccgatacagtgaaattcaagaccgctgttgtcggaaggcagccctacttgaccaagctctgtctaatgctaggctgtttggggaggatgaggtggaggtgctcaactggctggctgaggttgaggacaagctcagttcagtgttcgtaaaggatttcaaacaggatgtcctgcacaggcagcatgctgaccacctggctttaaatgaagaaattgttaatagaaagaagaatgtagatcaagctattaaaaatggtcaggctcttctaaaacaaaccacaggtgaggaggtgttacttatccaggaaaaactagatggtataaagactcgttacgcagacatcacagttactagctccaaggccctcagaactttagagcaagcccggcagctggccaccaagttccagtctacttatgaggaactgaccgggtggctgagggaggtggaggaggagctggcaaccagtggaggacagtctcccacaggggaacagataccccagtttcagcagagacagaaggaattaaagaaggaggtcatggagcacaggctggtgttggacacagtgaatgaggtgagccgtgctctcttagagctggtgccctggagagccagagaagggctggataaacttgtgtccgatgctaacgagcagtacaaactagtcagtgacactattggacaaagggtggatgaaattgatgctgctattcagagatcacaacagtatgagcaagctgccgatgcagaactagcttgggttgctgaaacaaaacggaaactgatggctctgggtccaattcgcctggaacaggaccagaccacagctcagcttcaggtacagaaggctttctccattgacattattcgacacaaagattcaatggatgaactcttcagtcaccgtagtgaaatctttggcacatgtggggaggagcaaaaaactgtattacaggaaaagacagagtctctaatacagcaatatgaagccattagcctactcaattcagagcgttatgcccgcctagagcgggcccaggtcttagtaaaccagttttgggaaacttatgaagagctcagcccctggattgaggaaactcgggcactaatagcacagttaccctctccagccattgatcatgagcagctcaggcagcaacaagaggaaatgaggcaattaagggaatctattgctgaacacaaacctcatattgacaaactactaaagataggcccacaactaaaggaattaaaccctgaggaaggggaaatggtggaagaaaaataccagaaagcagaaaacatgtatgcccaaataaaggaggaggtgcgccagcgagccctggctctggatgaagccgtgtcccagtccacacagattacagagtttcatgataaaattgagcctatgttggagacactggagaatctttcctctcgcctgcgtatgccaccactgatccctgctgaagtagacaagatcagagagtgcatcagtgacaataagagtgccaccgtggagctagaaaaactgcagccatcctttgaggccttgaagcgccgtggagaggagcttattggacgatctcagggagcagacaaggatctggctgcaaaagaaatccaggataaattggatcaaatggtattcttctgggaggacatcaaagctcgggctgaagaacgagaaatcaaatttcttgatgtccttgaattagcagagaagttctggtatgacatggcagctctcctgaccaccatcaaagacacccaggatattgtccatgacttggaaagcccaggcattgatccttccatcatcaaacaacaggttgaagctgctgagactattaaggaagagacagatggtctgcatgaagagctggagtttattcggatccttggagcagatttgatttttgcctgtggagaaactgagaagcctgaagtgaggaagagcattgatgagatgaataatgcttgggagaacttaaacaaaacatggaaagagaggctagaaaaacttgaggatgctatgcaagctgctgtgcagtatcaggacactcttcaggctatgtttgactggctagataacactgtgattaaactctgcaccatgccccctgttggcactgacctcaatactgttaaagatcagttaaatgaaatgaaggagttcaaagtagaagtttaccaacagcaaattgagatggagaagcttaatcaccagggtgaactgatgttaaagaaagctactgatgagacggacagagacattatacgagaaccactgacagaactcaaacacctctgggagaacctgggtgagaaaattgcccaccgacagcacaaactagaaggggctctgttggcccttggtcagttccagcatgccttagaggaactaatgagttggctgactcataccgaagagttgttagatgctcagagaccaataagtggagacccaaaagtcattgaagttgagctcgcaaagcaccatgtcctaaaaaatgatgttttggctcatcaagccacagtggaaacagtcaacaaagctggcaatgagcttcttgaatccagtgctggagatgatgccagcagcttaaggagccgtttggaagccatgaaccaatgctgggagtcagtgttacagaaaacagaggagagggagcagcagcttcagtcaactctgcagcaggcccagggcttccacagtgaaattgaagatttcctcttggaacttactagaatggagagccagctttctgcatctaagcccacaggaggacttcctgaaactgctagggaacagcttgatacacatatggaactctattcccagctgaaagccaaggaagagacttataatcaactacttgacaagggcagactcatgcttctaagccgtgacgactctgggtctggctccaagacagaacagagtgtagcacttttggagcagaagtggcatgtggtcagcagtaagatggaagaaagaaagtcaaagctggaagaggccctcaacttggcaacagaattccagaattccctacaagaatttatcaactggctcactctagcagagcagagtttaaacatcgcttctccaccaagcctgattctaaatactgtcctttcccagatagaagagcacaaggtttttgctaatgaagtaaatgctcatcgagaccagatcattgagctggatcaaactgggaatcaattaaagttccttagccaaaagcaggatgttgttctgatcaagaatttgttggtgagcgtgcagtctcgatgggagaaggttgtccagcgatctattgaaagagggcgatcactagatgatgccaggaagcgggcaaaacaattccatgaagcttggaaaaaactgattgactggctagaagatgcagagagtcacctggactcagaactagagatatccaatgacccagacaaaattaaacttcagctttctaagcataaggagtttcagaagactcttggtggcaagcagcctgtgtatgataccacaattagaactggcagagcactgaaagaaaagactttgcttcccgaagatagtcagaaacttgacaatttcctaggagaagtcagagacaaatgggatactgtttgtggcaagtctgtggagcggcagcacaagttggaggaagccctgctcttttcgggtcagttcatggatgctttgcaggcattggttgactggttatacaaggtggagccacagctggctgaggaccagcccgtgcacggggaccttgacctcgtcatgaacctcatggatgcacacaaggttttccagaaggaactgggaaagcgaacaggaaccgttcaggtcctgaagcggtcaggccgagagctgattgagaatagtcgagatgacaccacttgggtaaaaggacagctccaggaactgagcactcgctgggacactgtctgtaaactctctgtttccaaacaaagccggcttgagcaggccttaaaacaagcggaagtgtttcgagacacagtccacatgctgttggagtggctttctgaagcagagcaaacgcttcgctttcggggagcacttcctgatgacacagaggccctgcagtctctcattgacacccataaggaattcatgaagaaagtagaagaaaagcgagtggacgttaactcagcagtagccatgggagaagtcatcctggctgtctgccaccccgattgcatcacaaccatcaaacactggatcaccatcatccgagctcgcttcgaggaggtcctgacatgggctaagcagcaccagcagcgtcttgaaacggccttgtcagaactggtggctaatgctgagctcctggaagaacttctggcatggatccagtgggctgagaccaccctcattcagcgggatcaggagccaatcccgcagaacattgaccgagttaaagcccttatcgctgagcatcagacatttatggaggagatgactcgcaaacagcctgacgtggaccgggtcaccaagacatacaaaaggaaaaacatagagcctactcacgcgcctttcatagagaaatcccgcagcggaggcaggaaatccctaagtcagccaacccctcctcccatgccaatcctttcacagtctgaagcaaaaaacccacggatcaaccagctttctgcccgctggcagcaggtgtggctgttagcactggagcggcaaaggaaactgaatgatgccttggatcggctggaggagttgaaagaatttgccaactttgactttgatgtctggaggaaaaagtatatgcgttggatgaatcacaaaaagtctcgagtgatggatttcttccggcgcattgataaggaccaggatgggaagataacacgtcaggagtttatcgatggcattttagcatccaagttccccaccaccaagttagagatgactgctgtggctgacattttcgaccgagatggggatggttacattgattattatgaatttgtggctgctcttcatcccaacaaggatgcgtatcgaccaacaaccgatgcagataaaatcgaagatgaggttacaagacaagtggctcagtgcaaatgtgcaaaaaggtttcaggtggagcagatcggagagaataaataccggtttggggattctcagcagttgcggctggtccgtattctgcgcagcaccgtgatggttcgcgttggtggaggatggatggccttggatgaatttttagtgaaaaatgatccctgccgagcacgaggtagaactaacattgaacttagagagaaattcatcctaccagagggagcatcccagggaatgacccccttccgctcacggggtcgaaggtccaaaccatcttcccgggcagcttcccctactcgttccagctccagtgctagtcagagtaaccacagctgtacatccatgccatcttctccagccaccccagccagtggaaccaaggttatcccatcatcaggtagcaagttgaaacgaccaacaccaacttttcattctagtcggacatcccttgctggtgataccagcaatagttcttccccggcctccacaggtgccaaaactaatcgggcagaccctaaaaagtctgccagtcgccctgggagtcgggctgggagtcgagccgggagtcgagccagcagccggcgaggaagtgacgcttctgactttgacctcttagagacgcagtctgcttgttccgacacttcagaaagcagcgctgcagggggccaaggcaactccaggagagggctaaacaaaccttccaaaatcccaaccatgtctaagaagaccaccactgcctcccccaggactccaggtcccaagcgataa

SEQ ID NO: 1344 - DNA, 1389 bp, homo sapiens
atggcaaagtttcggagaaggacttgcatcattttggcactttttattctatttattttctctctgatgatgggtttaaaaatgctgagaccaaatacagctacttttggagctccttttggacttgaccttcttccagaacttcatcaacgaactattcatttggggaaaaattttgatttccaaaagagtgacagaatcaacagtgaaacaaataccaagaatttaaaaagtgttgaaatcactatgaaaccttccaaagcctctgaacttaacttggatgaactaccacctctgaacaattatctacatgtattttattacagttggtatggaaatccacaatttgatggtaaatatatacattggaatcatccagtgttagagcattgggaccctagaatagccaagaattatccacaagggagacacaaccctccagatgacattggctccagcttttatcctgaattgggaagttacagttctcgggatccttctgtcatagaaactcacatgagacaaatgcgctcagcttcaattggtgtactagccctctcttggtacccacctgatgtaaatgatgaaaatggagaacctactgataacttggtacccactattttggataaagctcataaatataacctaaaggttacttttcacatagaaccatatagcaatcgagatgatcaaaacatgtacaaaaatgtcaagtatattatagacaaatatggaaatcatccggccttttacaggtacaagacgaagactggcaatgctcttcctatgttttatgtctatgattcctatattaccaagcctgaaaaatgggccaatctgttaaccacctcagggtctcggagtattcgcaattctccttatgatggactgtttattgcccttctggtagaagaaaaacataagtatgatattcttcaaagtggttttgatggaatttacacatattttgccacaaatggctttacttatggctcatcacatcagaattgggctagcctaaaattattttgtgataaatacaacttaatatttatcccaagtgtgggcccaggatacatagataccagcatccgtccatggaacacgcaaaacactcggaaccgaatcaatgggaagtattatgaaattggtctgagtgccgcacttcagacacgccccagcttaatttctatcacctcttttaatgagtggcatgaaggaactcagattgaaaaagctgttcccaaaagaaccagtaatacagtgtacctagattaccgtcctcataaaccaggtctttacctagaactgactcgcaagtggtctgaaaaatacagtaaggaaagagcaacttatgcattagatcgccagctgcctgtttcttaa

SEQ ID NO: 1345 - DNA, 1005 bp, homo sapiens
atgtctgaaccaatcagagtccttgtgactggagcagctggtcaaattgcatattcactgctgtacagtattggaaatggatctgtctttggtaaagatcagcctataattcttgtgctgttggatatcacccccatgatgggtgtcctggacggtgtcctaatggaactgcaagactgtgcccttcccctcctgaaagatgtcatcgcaacagataaagaagacgttgccttcaaagacctggatgtggccattcttgtgggctccatgccaagaagggaaggcatggagagaaaagatttactgaaagcaaatgtgaaaatcttcaaatcccagggtgcagccttagataaatacgccaagaagtcagttaaggttattgttgtgggtaatccagccaataccaactgcctgactgcttccaagtcagctccatccatccccaaggagaacttcagttgcttgactcgtttggatcacaaccgagctaaagctcaaattgctcttaaacttggtgtgactgctaatgatgtaaagaatgtcattatctggggaaaccattcctcgactcagtatccagatgtcaaccatgccaaggtgaaattgcaaggaaaggaagttggtgtttatgaagctctgaaagatgacagctggctcaagggagaatttgtcacgactgtgcagcagcgtggcgctgctgtcatcaaggctcgaaaactatccagtgccatgtctgctgcaaaagccatctgtgaccacgtcagggacatctggtttggaaccccagagggagagtttgtgtccatgggtgttatctctgatggcaactcctatggtgttcctgatgatctgctctactcattccctgttgtaatcaagaataagacctggaagtttgttgaaggtctccctattaatgatttctcacgtgagaagatggatcttactgcaaaggaactgacagaagaaaaagaaagtgcttttgaatttctttcctctgcctga

SEQ ID NO: 1346 - DNA, 630 bp, homo sapiens
atgaagaaagtaaggcttaaggaactagagagtcgcctgcaacaagtggatggatttgaaaagcccaagctacttctggaacagtatcctaccaggccgcacattgcagcatgtatgctctatacaatccataacacttatgatgacattgaaaataaagtcgttgcagatctaggatgtggttgtggagtacttagcatcggaactgcaatgttaggagcagggttgtgtgttggatttgacatagatgaagacgcattggaaatatttaataggaatgcagaagagtttgagttaacaaatattgacatggttcaatgtgatgtgtgcttattatctaacagaatgtccaagtcattcgatacagtaattatgaatcctccctttgggaccaaaaataataaagggacagatatggcttttctaaagactgctttggaaatggcaagaacagcagtatattccttacacaaatcctcaactagagaacatgttcaaaagaaagctgcagaatggaaaatcaagatagatattatagcagaacttcgatatgacctgccagcatcatacaagtttcacaaaaagaaatcagtggacattgaagtggacctaattcggttttccttttaa

SEQ ID NO: 1347 - DNA, 3084 bp, homo sapiens; identical to SEQ ID NO: 1076

SEQ ID NO: 1348 - DNA, 606 bp, homo sapiens
atggcggcgcggacagcgttcggtgctgtgtgccggcgcctctggcagggattggggaatttttctgtaaacacttctaagggcaatacagccaaaaatggtggcttgcttctcagtaccaatatgaagtgggtacagttttcaaacctacacgttgatgttccaaaggatttgaccaaacctgtggtaacaatctctgatgaaccagacatattatataagcgcctctcggttttggtgaaaggtcacgataaggctgtattggacagttatgaatattttgctgtgcttgctgctaaagaacttggtatctctattaaagtacatgaacctccaaggaaaatagagcgatttactcttctccaatcagtgcatatttacaagaagcacagagttcagtatgaaatgagaacactttacagatgtttagagttagaacatctaactggaagcacagcagatgtctacttggaatatattcagcgaaacttacctgaaggggttgccatggaagtaacaaagacacaattagaacagttaccagaacacatcaaggagccaatctgggaaacactatcagaagaaaaagaagaaagcaagtcataa

SEQ ID NO: 1349 - DNA, 2079 bp, homo sapiens
atgttctacttccgaggctgtggccgttgggtcgcggtttccttcaccaagcagcaatttccgttggcacggttgagcagtgacagcgcggcgccccggactccgcacttcgacgtgatagtcattggtggaggacatgccgggactgaggcagccaccgccgccgctcggtgcggctctcggactctgctcctcactcaccgcgtggacacgatcggtcagatgtcatgtaatccttcctttggtggcatcggaaagggacatttaatgagggaagtagatgccttggatggcctgtgttctcgcatctgtgaccagtctggtgtacattataaagtattaaaccggcgtaagggaccagctgtgtggggtctgagagctcagattgataggaaactctataaacagaacatgcagaaagaaatcttgaatacaccactgcttactgttcaggagggagctgtagaagatcttattcttacagaaccagagcctgaacacactgggaaatgccgtgtcagtggggttgttttggtggatggaagcacagtatatgcagagagtgtgattctgactactgggacatttctgagaggcatgattgtaattggattggagacgcatccagcaggacgtttaggggatcagccttctataggattggctcagacactggagaagttagggtttgtggtgggaaggttgaagactgggactccaccccgaattgccaaagagtccattaatttcagtattctaaacaagcatataccggacaatccatccataccattcagctttaccaatgagacagtatggattaagccagaagatcagctgccatgttacttgactcacaccaaccctagagtggatgagattgtccttaagaaccttcaccttaatagtcatgttaaagaaacgacaagaggacctcgatactgtccctccattgaatcaaaagttttgcgttttccaaaccgtctacatcaggtttggttggaacctgaaggaatggattctgaccttatctacccacaggggttatctatgacgctaccagctgagttacaagagaaaatgatcacatgcatcagaggcttggagaaagctaaagtgattcagccaggctacggtgttcagtatgattacttagatccccgtcagatcaccccttccttggagactcatttggttcaacgactcttctttgctggacagatcaatggcaccactggttatgaggaagctgcagctcaaggtgtgatagccggaatcaacgccagtcttcgggtcagtcgcaagcctccctttgtggttagccgaacagaaggttacataggagtcttgattgatgacctcactactctgggcaccagtgaaccataccgcatgtttaccagccgagtagagttccgtttgtcactgcgccctgataatgctgacagccggctcacactgcgagggtataaagacgctggctgtgtgtcccaacaacgatatgaaagagcttgttggatgaagtcttctttagaagaaggcatttctgtgttgaaatctattgagtttttgagctctaaatggaaaaaattaatcccagaggcttctataagtactagtagaagtctgcctgtcagagctctcgatgttctgaagtatgaggaagttgacatggattcattagccaaggctgttccagagcccttgaagaagtatactaaatgtagagagctggctgaaagactgaaaatagaagccacttatgaatcagtgttgttccatcaactacaagaaataaagggagttcagcaagatgaagctctccaactgccaaaagacctagattatttgactatcagggatgtgtctttgtcccatgaagttcgagagaaactacattttagtcgtccacagacgatcggggctgctagtcgcatacccggagtaacacctgccgccatcatcaatctgctgagatttgtgaagaccactcaacgaagacagtcggctatgaatgaatcatccaagactgatcaatacttatgtgatgcagacagacttcaagagagagagttatag

SEQ ID NO: 1350 - DNA, 2097 bp, homo sapiens
atgaggaggtttctgttactatatgctacacagcagggacaggcaaaggccatcgcagaagaaatatgtgagcaagctgtggtacatggattttctgcagatcttcactgtattagtgaatccgataagtatgacctaaaaaccgaaacagctcctcttgttgttgtggtttctaccacgggcaccggagacccacccgacacagcccgcaagtttgttaaggaaatacagaaccaaacactgccggttgatttctttgctcacctgcggtatgggttactgggtctcggtgattcagaatacacctacttttgcaatggggggaagataattgataaacgacttcaagagcttggagcccggcatttctatgacactggacatgcagatgactgtgtaggtttagaacttgtggttgagccgtggattgctggactctggccagccctcagaaagcattttaggtcaagcagaggacaagaggagataagtggcgcactcccggtggcatcacctgcatcctcgaggacagaccttgtgaagtcagagctgctacacattgaatctcaagtcgagcttctgagattcgatgattcaggaagaaaggattctgaggttttgaagcaaaatgcagtgaacagcaaccaatccaatgttgtaattgaagactttgagtcctcacttacccgttcggtacccccactctcacaagcctctctgaatattcctggtttacccccagaatatttacaggtacatctgcaggagtctcttggccaggaggaaagccaagtatctgtgacttcagcagatccagtttttcaagtgccaatttcaaaggcagttcaacttactacgaatgatgccataaaaaccactctgctggtagaattggacatttcaaatacagacttttcctatcagcctggagatgccttcagcgtgatctgccctaacagtgattctgaggtacaaagcctactccaaagactgcagcttgaagataaaagagagcactgcgtccttttgaaaataaaggcagacacaaagaagaaaggagctaccttaccccagcatatacctgcgggatgttctctccagttcatttttacctggtgtcttgaaatccgagcaattcctaaaaaggcatttttgcgagcccttgtggactataccagtgacagtgctgaaaagcgcaggctacaggagctgtgcagtaaacaaggggcagccgattatagccgctttgtacgagatgcctgtgcctgcttgttggatctcctcctcgctttcccttcttgccagccaccactcagtctcctgctcgaacatcttcctaaacttcaacccagaccatattcgtgtgcaagctcaagtttatttcacccaggaaagctccattttgtcttcaacattgtggaatttctgtctactgccacaacagaggttctgcggaagggagtatgtacaggctggctggccttgttggttgcttcagttcttcagccaaacatacatgcatcccatgaagacagcgggaaagccctggctcctaagatatccatctctcctcgaacaacaaattctttccacttaccagatgacccctcaatccccatcataatggtgggtccaggaaccggcatagccccgtttattgggttcctacaacatagagagaaactccaagaacaacacccagatggaaattttggagcaatgtggttgttttttggctgcaggcataaggatagggattatctattcagaaaagagctcagacatttccttaagcatgggatcttaactcatctaaaggtttccttctcaagagatgctcctgttggggaggaggaagccccagcaaagtatgtgcaagacaacatccagcttcatggccagcaggtggcgagaatcctcctccaggagaacggccatatttatgtgtgtggagatgcaaagaatatggccaaggatgtacatgatgcccttgtgcaaataataagcaaagaggttggagttgaaaaactagaagcaatgaaaaccctggccactttaaaagaagaaaaacgctaccttcaggatatttggtcataa

SEQ ID NO: 1351 - DNA, 666 bp, homo sapiens
atggcggcggcggttcggatgaacatccagatgctgctggaggcggccgactatctggagcggcgggagagagaagctgaacatggttatgcctccatgttaccatacaataacaaggacagagatgccttaaaacggaggaacaaatccaaaaagaataacagcagtagcagatcaactcacaatgaaatggagaagaatagacgggctcatcttcgcttgtgcctggagaagttgaaggggctggtgccacttggacccgaatcaagtcgacacactacgttgagtttattaacaaaagccaaattgcacataaagaaacttgaagattgtgacagaaaagccgttcaccaaatcgaccagcttcagcgagagcagcgacacctgaagaggcagctggagaagctgggcattgagaggatccggatggacagcatcggctccaccgtctcctcggagcgctccgactccgacagggaagaaatcgacgttgacgtggagagcacggactatctcacaggtgatctggactggagcagcagcagtgtgagcgactctgacgagcggggcagcatgcagagcctcggcagtgatgagggctattccagcaccagcatcaagagaataaagctgcaggacagtcacaaggcgtgtcttggtctctaa

SEQ ID NO: 1352 - DNA, 5883 bp, homo sapiens
atggcacagcaagctgccgataagtatctctatgtggataaaaacttcatcaacaatccgctggcccaggccgactgggctgccaagaagctggtatgggtgccttccgacaagagtggctttgagccagccagcctcaaggaggaggtgggcgaagaggccatcgtggagctggtggagaatgggaagaaggtgaaggtgaacaaggatgacatccagaagatgaacccgcccaagttctccaaggtggaggacatggcagagctcacgtgcctcaacgaagcctcggtgctgcacaacctcaaggagcgttactactcagggctcatctacacctattcaggcctgttctgtgtggtcatcaatccttacaagaacctgcccatctactctgaagagattgtggaaatgtacaagggcaagaagaggcacgagatgccccctcacatctatgccatcacagacaccgcctacaggagtatgatgcaagaccgagaagatcaatccatcttgtgcactggtgaatctggagctggcaagacggagaacaccaagaaggtcatccagtatctggcgtacgtggcgtcctcgcacaagagcaagaaggaccagggcgagctggagcggcagctgctgcaggccaaccccatcctggaggccttcgggaacgccaagaccgtgaagaatgacaactcctcccgcttcggcaaattcattcgcatcaactttgatgtcaatggctacattgttggagccaacattgagacttatcttttggagaaatctcgtgctatccgccaagccaaggaagaacggaccttccacatcttctattatctcctgtctggggctggagagcacctgaagaccgatctcctgttggagccgtacaacaaataccgcttcctgtccaatggacacgtcaccatccccgggcagcaggacaaggacatgttccaggagaccatggaggccatgaggattatgggcatcccagaagaggagcaaatgggcctgctgcgggtcatctcaggggttcttcagctcggcaacatcgtcttcaagaaggagcggaacactgaccaggcgtccatgcccgacaacacagctgcccaaaaggtgtcccatctcttgggtatcaatgtgaccgatttcaccagaggaatcctcaccccgcgcatcaaggtgggacgggattacgtccagaaggcgcagactaaagagcaggctgactttgccatcgaggccttggccaaggcgacctatgagcggatgttccgctggctggtgctgcgcatcaacaaggctctggacaagaccaagaggcagggcgcctccttcatcgggatcctggacattgccggcttcgagatctttgatctgaactcgtttgagcagctgtgcatcaattacaccaatgagaagctgcagcagctcttcaaccacaccatgttcatcctggagcaggaggagtaccagcgcgagggcatcgagtggaacttcatcgactttggcctcgacctgcagccctgcatcgacctcattgagaagccagcaggccccccgggcattctggccctgctggacgaggagtgctggttccccaaagccaccgacaagagcttcgtggagaaggtgatgcaggagcagggcacccaccccaagttccagaagcccaagcagctgaaggacaaagctgatttctgcattatccactatgccggcaaggtggattacaaagctgacgagtggctgatgaagaacatggatcccctgaatgacaacatcgccacactgctccaccagtcctctgacaagtttgtctcggagctgtggaaggatgtggaccgcatcatcggcctggaccaggtggccggcatgtcggagaccgcactgcccggggccttcaagacgcggaagggcatgttccgcactgtggggcagctttacaaggagcagctggccaagctgatggctacgctgaggaacacgaaccccaactttgtccgctgcatcatccccaaccacgagaagaaggccggcaagctggacccgcatctcgtgctggaccagctgcgctgcaacggtgttctcgagggcatccgtatctgccgccagggcttccccaacagggtggtcttccaggagtttcggcagagatatgagatcctgactccaaactccattcccaagggtttcatggacgggaagcaggcgtgcgtgctcatgataaaagccctggagctcgacagcaatctgtaccgcattggccagagcaaagtcttcttccgtgccggtgtgctggcccacctggaggaggagcgagacctgaagatcaccgacgtcatcatagggttccaggcctgctgcaggggctacctggccaggaaagcatttgccaagcggcagcagcagcttaccgccatgaaggtcctccagcggaactgcgctgcctacctgaagctgcggaactggcagtggtggcggctcttcaccaaggtcaagccgctgctgcaggtgagccggcaggaggaggagatgatggccaaggaggaggagctggtgaaggtcagagagaagcagctggctgcggagaacaggctcacggagatggagacgctgcagtctcagctcatggcagagaaattgcagctgcaggagcagctccaggcagaaaccgagctgtgtgccgaggctgaggagctccgggcccgcctgaccgccaagaagcaggaattagaagagatctgccatgacctagaggccagggtggaggaggaggaggagcgctgccagcacctgcaggcggagaagaagaagatgcagcagaacatccaggagcttgaggagcagctggaggaggaggagagcgcccggcagaagctgcagctggagaaggtgaccaccgaggcgaagctgaaaaagctggaggaggagcagatcatcctggaggaccagaactgcaagctggccaaggaaaagaaactgctggaagacagaatagctgagttcaccaccaacctcacagaagaggaggagaaatctaagagcctcgccaagctcaagaacaagcatgaggcaatgatcactgacttggaagagcgcctccgcagggaggagaagcagcgacaggagctggagaagacccgccggaagctggagggagactccacagacctcagcgaccagatcgccgagctccaggcccagatcgcggagctcaagatgcagctggccaagaaagaggaggagctccaggccgccctggccagagtggaagaggaagctgcccagaagaacatggccctcaagaagatccgggagctggaatctcagatctctgaactccaggaagacctggagtctgagcgtgcttccaggaataaagctgagaagcagaaacgggaccttggggaagagctagaggctctgaaaacagagttggaggacacgctggattccacagctgcccagcaggagctcaggtcaaaacgtgagcaggaggtgaacatcctgaagaagaccctggaggaggaggccaagacccacgaggcccagatccaggagatgaggcagaagcactcacaggccgtggaggagctggcggagcagctggagcagacgaagcgggtgaaagcaaacctcgagaaggcaaagcagactctggagaacgagcggggggagctggccaacgaggtgaaggtgctgctgcagggcaaaggggactcggagcacaagcgcaagaaagtggaggcgcagctgcaggagctgcaggtcaagttcaacgagggagagcgcgtgcgcacagagctggccgacaaggtcaccaagctgcaggtggagctggacaacgtgaccgggcttctcagccagtccgacagcaagtccagcaagctcaccaaggacttctccgcgctggagtcccagctgcaggacactcaggagctgctgcaggaggagaaccggcagaagctgagcctgagcaccaagctcaagcaggtggaggacgagaagaattccttccgggagcagctggaggaggaggaggaggccaagcacaacctggagaagcagatcgccaccctccatgcccaggtggccgacatgaaaaagaagatggaggacagtgtggggtgcctggaaactgctgaggaggtgaagaggaagctccagaaggacctggagggcctgagccagcggcacgaggagaaggtggccgcctacgacaagctggagaagaccaagacgcggctgcagcaggagctggacgacctgctggtggacctggaccaccagcgccagagcgcgtgcaacctggagaagaagcagaagaagtttgaccagctcctggcggaggagaagaccatctctgccaagtatgcagaggagcgcgaccgggctgaggcggaggcccgagagaaggagaccaaggctctgtcgctggcccgggccctggaggaagccatggagcagaaggcggagctggagcggctcaacaagcagttccgcacggagatggaggaccttatgagctccaaggatgatgtgggcaagagtgtccacgagctggagaagtccaagcgggccctagagcagcaggtggaggagatgaagacgcagctggaagagctggaggacgagctgcaggccaccgaagatgccaagctgcggttggaggtcaacctgcaggccatgaaggcccagttcgagcgggacctgcagggccgggacgagcagagcgaggagaagaagaagcagctggtcagacaggtgcgggagatggaggcagagctggaggacgagaggaagcagcgctcgatggcagtggccgcccggaagaagctggagatggacctgaaggacctggaggcgcacatcgactcggccaacaagaaccgggacgaagccatcaaacagctgcggaagctgcaggcccagatgaaggactgcatgcgcgagctggatgacacccgcgcctctcgtgaggagatcctggcccaggccaaagagaacgagaagaagctgaagagcatggaggccgagatgatccagttgcaggaggaactggcagccgcggagcgtgccaagcgccaggcccagcaggagcgggatgagctggctgacgagatcgccaacagcagcggcaaaggagccctggcgttagaggagaagcggcgtctggaggcccgcatcgcccagctggaggaggagctggaggaggagcagggcaacacggagctgatcaacgaccggctgaagaaggccaacctgcagatcgaccagatcaacaccgacctgaacctggagcgcagccacgcccagaagaacgagaatgctcggcagcagctggaacgccagaacaaggagcttaaggtcaagctgcaggagatggagggcactgtcaagtccaagtacaaggcctccatcaccgccctcgaggccaagattgcacagctggaggagcagctggacaacgagaccaaggagcgccaggcagcctgcaaacaggtgcgtcggaccgagaagaagctgaaggatgtgctgctgcaggtggatgacgagcggaggaacgccgagcagtacaaggaccaggccgacaaggcatctacccgcctgaagcagctcaagcggcagctggaggaggccgaagaggaggcccagcgggccaacgcctcccgccggaaactgcagcgcgagctggaggacgccactgagacggccgatgccatgaaccgcgaagtcagctccctaaagaacaagctcaggcgcggggacctgccgtttgtcgtgccccgccgaatggcccggaaaggcgccggggatggctccgacgaagaggtagatggcaaagcggatggggctgaggccaaacctgccgaataa

SEQ ID NO: 1353 - DNA, 7647 bp, homo sapiens
atgaatataaatgatggaggaagacgacgctttgaagataatgaacatacattacggatatatcctggggctatttcagaagggacaatctactgtccgattcctgccagaaaaaactccacagctgctgaggtgattgagtctcttataaacaaacttcatcttgacaaaacaaaatgttatgttctagcagaggtaaaggaatttggtggagaagaatggattctcaatccaacagattgtccagttcagcgaatgatgctgtggccccgaatggctctggaaaatcgcttaagtggagaggactaccgcttccttctgagagagaaaaaccttgatggatcaatccattatggtagcctgcagtcatggctacgggtaacagaagaacgtcgcaggatgatggaacggggttttcttccacagcctcaacagaaagactttgatgatttatgtagtttacctgatttgaatgagaaaactctcttagaaaacctacgaaatcgctttaagcatgaaaaaatttatacctatgttggcagtattctaatagttattaacccattcaagtttcttcctatttataaccccaaatatgtcaaaatgtatgataaccaccaactgggaaaacttgagccccacatttatgctgtggctgatgtagcttatcatgccatgcttcagcgcaaaaagaatcagtgcatcgtgatttcaggagagagtggttctgggaagactcaaagcacaaactttcttattcaccaccttactgctctcagtcagaaaggatttgccagtggagtagaacagattattcttggagctggaccagtacttgaggcctttggaaatgcaaagacagctcataataacaattcaagtcgttttgggaagtttattcaagtaaattaccaggaaacaggcactgtacttggtgcctatgttgaaaaatatctactggagaagtccagactcgtttatcaggagcataatgaacggaactatcatgtattctattacctcctggcaggagcaagtgaagatgagagatcagcattccatcttaagcaaccagaggaatatcattatctcaatcagataacaaagaaacccctcagacagagctgggatgattattgctatgactctgagccggattgcttcacggtggaaggagaagatttgagacatgactttgagcgcctacaacttgccatggaaatggtaggatttcttcccaagacacgaagacagattttctctcttctctcagccatactacatttgggtaatatctgttacaaaaagaagacataccgggatgactccattgatatctgtaatcctgaagttctgcctattgtctcagaattattagaggttaaagaagagatgctatttgaagcattagttacaaggaagacggtgacagtgggagaaaagcttattttgccatacaagttggcagaggctgtgacagtgaggaactccatggctaagtctctgtatagtgccctgtttgactggatagtttttcgaattaatcatgcacttctgaatagtaaagatttagagcataataccaagacattgtctattggtgttcttgatatttttgggtttgaagattatgaaaataacagctttgaacagttctgtattaattttgctaatgaacgtttacagcactactttaatcagcatatctttaaattggaacaagaggaatatagaactgaaggtatcagctggcacaacatagattacattgataatacctgctgcataaatcttattagcaaaaaaccaacaggactgcttcatcttttggatgaagaaagcaactttccacaggctacaaatcaaacattgctagacaagtttaagcatcaacatgaagataattcttacatcgaatttccagccgtgatggagcctgctttcattataaaacattatgctggaaaagtaaaatatggggtaaaggatttccgggaaaaaaatacagatcatatgcgcccagacattgtagctcttctgagaagcagcaagaatgcatttatctctgggatgattggaattgatcctgtagctgttttccgatgggcaattctccgagcttttttcagagccatggttgctttcagggaagctgggaaaagaaacattcacagaaaaactggacatgatgatacagcgccatgtgcaattttgaaaagtatggatagttttagctttctccaacacccagtccaccagaggagcttagagattctgcagagatgcaaggaagagaagtacagtataacccggaaaaatcccagaacacctctttctgatctccagggcatgaatgctctaaatgaaaaaaaccaacatgatacatttgatattgcctggaatggcagaactgggattcgccagagcagactatcaagtggcacctccttgcttgataaagatggaatatttgctaattcaactagcagcaaactcctggagagagcccatggaattctcacgagaaacaaaaatttcaaatccaagcctgcccttccaaagcacttgctagaagtaaattctttaaagcacctgacaagactgacactacaagatcgcattaccaagtctcttcttcatttacacaagaagaaaaaacctcccagcatcagtgcccagtttcaggcatcattaagcaagctaatggaaacacttggtcaagcagaaccatattttgtaaaatgcattcgctctaatgctgaaaagctgcccttaaggttcagtgatgtcttggtacttagacagcttcgatacaccgggatgctggaaacagttcgaattcgccaatcaggatacagctccaaatattctttccaggattttgtgagccacttccatgtacttcttccccgaaatattattccatccaaatttaacattcaggatttcttcaggaaaataaatcttaatccagataattatcaagttggaaaaaccatggtctttctaaaggagcaggaacgacagcacttacaagatctgcttcaccaagaggtgctccgcagaatcatattgttgcagcgatggttcagggtcttgctgtgtaggcagcatttcctccatctgagacaagcatctgttattatccagagattctggaggaattacctaaatcagaagcaagtcagagatgcagctgtgcagaaggatgcttttgttatggctagtgcagctgctcttctccaagcttcctggcgtgctcacttagagaggcagcggtacttggagttacgggctgcagccatcgttatccagcagaaatggagagattactataggcgcaggcacatggctgctatttgcatacaagcaagatggaaagcctacagggaaagtaaaaggtaccaagaacaaaggaaaaaaattatccttttgcaatcaacatgtagaggattcagagcaagacaaagatttaaagctttaaaagaacaaaggctaagagaaacaaagccagaagttggattggtgaatattaagggatatggatctctggaaattcagggttcagacccttcaggatgggaggattgttcttttgacaacagaataaaagccatagaggaatgtaaatctgtaatagagagtaatcgaattagccgtgaaagttcagtggactgcttgaaggagtcaccaaacaagcagcaggagagagcccaaagccagagtggtgtggacttgcaggaagatgtgcttgtaagagagagacccagatccttggaggatctccatcagaaaaaagtaggccgggctaagagagaaagtaggagaatgagagaactagagcaagctatatttagcttagaattgctgaaagttcgttctcttggtggtatttctccttcagaggatcgcagatggtctacagaattggtgcctgaaggccttcagtctccacggggtacacctgatagtgagagctctcaaggaagcttggaacttctgagctatgaggaaagccaaaagagcaaactagagtctgtcatttcagatgaaggagacttgcagtttccatcacctaagatatccagcagtccaaaatttgattcacgggacaatgccctcagtgcctcaaatgagactagcagtgcagagcatttgaaggatggaactatgaaggaaatggtggtctgcagttctgagtctattacctgtaaaccacagctgaaagactccttcatttcaaatagtctacctacttttttttatatcccccaacaagacccactgaaaacaaattcccaactagacacaagtatccaaagaaacaaactattggaaaatgaagacacagcgggggaagctcttactttggatatcaacagggaaactagaaggtatcactgctcaggaaaagatcagattgttccttctttgaatacagagtcttctaatcctgtgcttaagaagttagaaaagctaaacactgagaaggaagaaaggcaaaaacagttgcagcaacagaatgaaaaagagatgatggaacagattcgccagcaaacagatattttagagaaggagcgcaaagccttcaagacaattgaaaagccaagaattggagagtgtttggtggcaccatcttcctatcagtcaaagcaaagagtagagaggccatcctctctcctcagcttaaatacctcaaataagggagaacttaatgtactggggtccctatcattaaaagatgcagctcttgcccaaaaagacagttcctctgctcacttacccccaaaggaccgacctgtcaccgtgttctttgaaagaaaaggaagtccatgccaatctagtactgtcaaggaattatccaagacagacagaatgggcacccagctgaatgtagcctgtaaactctcaaataatcgcatttcaaaaagagaacactttaggccaactcagtcttacagccacaattctgatgacctttccagagagggaaatgctaggcccattttcttcactccaaaggacaatatgagtattccccttgtcagcaaagaagccttaaacagtaaaaatcctcaactccataaagaagatgaaccagcatggaaacctgtgaagttagctgggccaggccaaagagagacatcacagcgattttcgtcagttgatgaacaagcaaaacttcataagactatgtctcaaggagagattaccaagttggcagtgagacagaaggcttcagattcagatataagacctcagagagctaagatgagattctgggccaaagggaaacaaggggagaagaagactaccagagtgaaacctactacccagtcagaggtttcgccactctttgcaggcacagatgtgattccagctcatcagtttccagatgaattagctgcatatcacccaacacctcctttgagcccagaactgcccggcagttgccggaaggaattcaaagagaacaaagaaccttctccaaaggctaagcgcaagcgaagtgtgaagattagcaacgtggctttggattctatgcattggcaaaatgactctgtccagatcatagcaagtgtcagtgatttaaaaagcatggatgaatttcttctgaaaaaggtgaatgacctagataatgaagacagcaagaaggatacactagtggatgttgtatttaaaaaagccctgaaggaatttcggcagaatatcttcagcttttattcatctgcattggcgatggatgatgggaaaagcatacggtataaagacctctatgcactatttgaacagattctggaaaagacgatgaggcttgagcagcgtgattcactgggtgaatctccagtgagagtttgggtcaacacttttaaagtgtttttagatgaatatatgaatgaattcaagacttcagattgcacagccacaaaggtgccaaaaacagaaagaaagaaaagaaggaaaaaggaaactgatttggtggaagaacacaatggtcacatctttaaagccacccaatatagcatccctacatactgtgaatactgttcttctttgatatggataatggaccgagcctctgtttgcaaattatgcaagtatgcttgccataagaagtgctgtctgaaaaccacagccaagtgctctaaaaagtatgatccagagctgtcatctcgacaatttggggttgaactgtcccgtttgaccagtgaagaccgaactgttcctttagtagtggaaaagctcataaactacattgaaatgcatggactgtatacagaaggtatttatcgaaagtctggttcgactaataaaatcaaggagcttcggcagggtctagatacagatgctgagagtgtaaatctagatgactataacatacacgtcattgcaagtgtattcaaacaatggcttcgagatttgcccaatcctctcatgacctttgaactctatgaggaatttcttcgagctatgggccttcaggagaggaaggagacaatccgtggtgtatactctgtgattgatcaactctcccgaactcatctcaatacactggaacgcctcatctttcatctagtcaggattgctctgcaggaagacactaatcgaatgtctgctaatgctttggccattgtgtttgcgccctgcattctccgctgccctgacaccactgacccactacaaagtgtacaggacatcagtaagactaccacttgtgtggaactgattgttgtggaacaaatgaataaatacaaggctcgtctcaaagatatcagtagcttggaatttgctgagaataaggcaaagaccaggttgtcactgattcgtagatcaatgggaaaggggcgtattcgtcgaggaaactatccaggtccatcgtctcctgttgtagttcggttgccttctgtgtctgatgtctcagaggagaccttgactagtgaggcagccatggagactgacatcacagaacagcagcaagcagctatgcagcaggaggagagagtactgactgagcagattgagaacctacagaaggagaaggaggagctaacatttgagatgcttgtactggaaccccgtgcctctgatgatgaaacccttgagtctgaggcctccattgggactgctgatagctcagagaatttgaatatggagtctgaatatgctatctctgagaaatcagaaagaagcttagcccttagctccctgaagacagctggcaagtctgaaccttccagcaagttgcgaaagcaacttaaaaagcagcaagactctttagatgtcgtggactcttcggtctcctctttatgtctgtctaacacggcatcatctcatgggaccagaaaactatttcagatttattccaaatctccattctaccgagctgcctcaggtaatgaggccctgggaatggaaggaccattgggccagaccaaattcctggaagacaagcctcagttcatcagcagaggaaccttcaacccggaaaagggcaaacaaaaattaaagaatgtgaaaaactcacctcagaaaaccaaagagaccccagaggggacagtcatgtctggccgcagaaaaactgtggacccagactgcacctccaaccaacagctagcactctttggaaataatgaatttatggtctga

SEQ ID NO: 1354 - DNA, 2373 bp, homo sapiens
atgtcgcggcggcggcacagcgacgagaacgacggtgggcagcctcacaaaaggagaaagacctctgatgcaaatgaaactgaagatcatttggaatctttaatatgtaaagtaggagaaaagagtgcctgctctttggagagcaacctagaaggcttggctggtgttttggaagctgatcttcctaactacaagagcaagatcttaaggcttctttgtacagttgcacgcctattacctgagaagctgacaatttatacaacattagttggactactgaatgccaggaattacaattttggtggagaatttgtagaagccatgattcgtcaacttaaagaatcattgaaagcaaacaattataatgaagccgtgtatttggtccgttttttatctgatcttgtgaattgtcatgtgattgccgccccatcaatggttgctatgtttgaaaattttgtaagcgtaactcaggaagaagatgtacctcaggtgcgacgagattggtatgtgtatgcatttctgtcatctttgccctgggttggaaaggagttgtacgaaaagaaagatgcagagatggaccgcatctttgccaacactgaaagctatcttaaaagacgccaaaagactcatgtacccatgttacaggtatggactgctgataaaccacatccacaagaagagtatttagattgcctgtgggcccagattcagaaattgaaaaaggatcgctggcaggaacggcacatcctaagaccttatcttgcctttgacagcatcctgtgtgaagcactgcagcacaatctgcctccttttacaccacctcctcacactgaagattcagtgtacccaatgccaagggtcatcttcagaatgtttgattacacagatgatcccgagggtcctgtcatgccagggagtcattcagtggaaagatttgtaatagaagagaatcttcactgcatcattaagtcccactggaaggaaaggaagacttgtgctgcacagttagtgagctatccagggaagaacaagatccccttgaactaccacatagttgaggtgatctttgcagagctgtttcaacttccagcaccccctcacattgatgtgatgtacacaacactcctcattgaactgtgcaaacttcaacctggctctctaccccaagttcttgcacaggcaactgaaatgctatacatgcgtttggacacaatgaacactacctgtgtagacaggtttattaattggttttctcatcatctaagtaacttccagttccgttggagctgggaagattggtcagattgtcttagtcaagatcctgaaagtcccaaaccgaagtttgtaagagaagttctagaaaaatgtatgaggttgtcttaccatcagcgtatattagatattgttcctcctaccttctcagctctgtgtcctgcaaacccaacctgcatttacaagtatggagatgaaagtagcaattctcttcctggacattctgttgccctctgtttagctgttgcctttaaaagtaaggcaaccaatgatgaaatcttcagcattctgaaagatgtaccaaatcctaaccaggatgatgacgacgatgaaggattcagttttaacccattgaaaatagaagtctttgtacagactctgctacacttggcagccaaatcattcagccactccttcagtgctcttgcaaagtttcatgaagtcttcaaaaccctagctgaaagtgatgaaggaaagttacatgtgctaagagttatgtttgaggtctggaggaaccatccacagatgattgctgtactagtggataagatgattcgtacacaaatagttgattgtgctgccgtagcaaattggatcttctcttcagaactatctcgtgactttaccagattgtttgtttgggaaattttgcactctacaattcgtaagatgaacaaacatgtcctgaagatccagaaagagctggaagaagctaaagagaaacttgctaggcaacacaaacggcgaagtgatgatgacgacagaagcagtgacaggaaagacggggttcttgaggaacaaatagaacgacttcaggaaaaagtggaatctgctcagagtgaacaaaagaatcttttcctcgttatatttcagcggtttatcatgatcttgaccgagcacctagtacgatgcgaaactgatgggaccagtgtattaacaccatggtataagaactgtatagagaggctgcagcagatcttcctacagcatcaccaaataatccagcagtacatggtgaccctggagaaccttctcttcactgctgaattagaccctcatatcttggccgtgttccagcagttctgtgccctgcaggcctaa

SEQ ID NO: 1355 - DNA, 3777 bp, homo sapiens
atggagaagtatgttagactacagaagattggagaaggttcatttggaaaagccattcttgttaaatctacagaagatggcagacagtatgttatcaaggaaattaacatctcaagaatgtccagtaaagaaagagaagaatcaaggagagaagttgcagtattggcaaacatgaagcatccaaatattgtccagtatagagaatcatttgaagaaaatggctctctctacatagtaatggattactgtgagggaggggatctgtttaagcgaataaatgctcagaaaggcgttttgtttcaagaggatcagattttggactggtttgtacagatatgtttggccctgaaacatgtacatgatagaaaaattcttcatcgagacattaaatctcagaacatatttttaactaaagatggaacagtacaacttggagattttggaattgctagagttcttaatagtactgtagagctggctcgaacttgcatagggaccccatactacttgtcacctgaaatctgtgaaaacaaaccttacaataataaaagtgacatttgggctctggggtgtgtcctttatgagctgtgtacacttaaacatgcttttgaagctggcagtatgaaaaacctggtactgaagataatatctggatcttttccacctgtgtctttgcattattcctatgatctccgcagtttggtgtctcagttatttaaaagaaatcctagggatagaccatcagtcaactccatattggagaaaggttttatagccaaacgcattgaaaagtttctctctcctcagcttattgcagaagaattttgtctaaaaacattttcgaagtttggatcacagcctataccagctaaaagaccagcttcaggacaaaactcgatttctgttatgcctgctcagaaaattacaaagcctgccgctaaatatggaatacctttagcatataagaaatatggagataaaaaattacacgaaaagaaaccactgcaaaaacataaacaggcccatcaaactccagagaagagagtgaatactggagaagaaaggaggaaaatatctgaggaagcagcaagaaagagaaggctggaatttattgaaaaagaaaagaaacaaaaggatcagattattagtttaatgaaggctgaacaaatgaaaaggcaagaaaaggaaaggttggaaagaataaatagggccagggaacaaggatggagaaatgtgctaagtgctggtggaagtggtgaagtaaaggctccttttctgggcagtggagggactatagctccatcatctttttcttctcgaggacagtatgaacattaccatgccatttttgaccaaatgcagcaacaaagagcagaagataatgaagctaaatggaaaagagaaatatatggtcgaggtcttccagaaagaggaattctgcctggagttcgtccaggatttccttatggggctgcaggtcatcaccattttcctgatgctgatgatattagaaaaactttgaaaagattgaaggcggtgtctaaacaagccaatgcaaacaggcaaaaagggcagctagctgtagaaagagctaaacaagtagaagagttcctgcagcgaaaacgggaagctatgcagaataaagctcgagccgaaggacatatggtttatctggcaagactgaggcaaataagactacagaatttcaatgagcgccaacagattaaagccaaacttcgtggtgaaaagaaagaagctaatcattctgaaggacaagaaggaagtgaagaggctgacatgaggcgcaaaaaaatcgaatcactgaaggcccatgcaaatgcacgtgctgctgtactaaaagaacaactagaacgaaagagaaaggaggcttatgagagagaaaaaaaagtgtgggaagagcatttggtggctaaaggagttaagagttctgatgtttctccacctttgggacagcatgaaacaggtggctctccatcaaagcaacagatgagatctgttatttctgtaacttcagctttgaaagaagttggcgtggacagtagtttaactgatacccgggaaacttcagaagagatgcaaaagaccaacaatgctatttcaagtaagcgagaaatacttcgtagattaaatgaaaatcttaaagctcaagaagatgaaaaaggaaagcagaatctctctgatacttttgagataaatgttcatgaagatgccaaagagcatgaaaaagaaaaatcagtttcatctgatcgcaagaagtgggaggcaggaggtcaacttgtgattcctctggatgagttaacactagatacatccttctctacaactgaaagacatacagtgggagaagttattaaattaggtcctaatggatctccaagaagagcctgggggaaaagtccgacagattctgttctaaagatacttggagaagctgaactacaacttcagacagaactattagaaaatacaactattagaagtgagatttctcccgaaggggaaaagtacaaacccttaattactggagaaaaaaaagtacaatgtatttcacatgaaataaacccatcagctattgttgattctcctgttgagacaaaaagtcccgagttcagtgaggcatctccacagatgtcattgaaactggaaggaaatttagaagaacctgatgatttggaaacagaaattctacaagagccaagtggaacaaacaaagatgagagcttgccatgcactattactgatgtgtggattagtgaggaaaaagaaacaaaggaaactcagtcggcagataggatcaccattcaggaaaatgaagtttctgaagatggagtctcgagtactgtggaccaacttagtgacattcatatagagcctggaaccaatgattctcagcactctaaatgtgatgtagataagtctgtgcaaccggaaccatttttccataaggtggttcattctgaacacttgaacttagtccctcaagttcaatcagttcagtgttcaccagaagaatcctttgcatttcgatctcactcgcatttaccaccaaaaaataaaaacaagaattccttgctgattggactttcaactggtctgtttgatgcaaacaacccaaagatgttaaggacatgttcacttccagatctctcaaagctgttcagaacccttatggatgttcccaccgtaggagatgttcgtcaagacaatcttgaaatagatgaaattgaagatgaaaacattaaagaaggaccttctgattctgaagacattgtgtttgaagaaactgacacagatttacaagagctgcaggcctcgatggaacagttacttagggaacaacctggtgaagaatacagtgaagaagaagagtcagtcttgaagaacagtgatgtggagccaactgcaaatgggacagatgtggcagatgaagatgacaatcccagcagtgaaagtgccctgaacgaagaatggcactcagataacagtgatggtgaaattgctagtgaatgtgaatgcgatagtgtctttaaccatttagaggaactgagacttcatctggagcaggaaatgggctttgaaaaattctttgaggtttatgagaaaataaaggctattcatgaagatgaagatgaaaatattgaaatttgttcaaaaatagttcaaaatattttgggaaatgaacatcagcatctttatgccaagattcttcatttagtcatggcagatggagcctaccaagaagataatgatgaataa

SEQ ID NO: 1356 - DNA, 3363 bp, homo sapiens
atggcggaggcgcctcctgtctcaggtacttttaaattcaatacagatgctgctgaattcattcctcaggagaaaaaaaattctggtctaaattgtgggactcaaaggagactagactctaataggattggtagaagaaattacagttcaccacctccctgtcacctttccaggcaggtcccttatgatgaaatctctgctgttcatcagcatagttatcatccgtcaggaagcaaacctaagagtcagcagacgtctttccagtcctctccttgtaataaatcgcccaagagccatggccttcagaatcaaccttggcagaaattgaggaatgagaagcaccatatcagagtcaagaaagcacagagtcttgctgagcagacctcagatacagctggattagagagctcgaccagatcagagagtgggacagacctcagagagcatagtccttctgagagtgagaaggaagttgtgggtgcagatcccaggggagcaaaacccaaaaaagcaacacagtttgtatacagctatggtagaggaccaaaagtcaaggggaaactcaaatgtgaatggagtaaccgaacaactccaaaaccggaggatgctggacccgaaagtaccaaacctgtgggggttttccaccctgactcttcagaggcatcctctagaaaaggagtattggatgggtatggagccagacgaaatgagcagagaagatacccacagaaaaggcctccctgggaagtggagggggccaggccacgaccaggcagaaatccaccaaaacaggagggccaccgacatacaaacgcaggacacagaaacaacatgggccccattccaaaggatgacctcaatgaaagaccagcaaaatctacctgtgacagtgagaacttggcagtcatcaacaagtcttccaggagggttgaccaagagaaatgcactgtacggaggcaggatcctcaagtagtatctcctttctcccgaggcaaacagaaccatgtgctaaagaatgtggaaacgcacacaggttctctaattgaacaactaacaacagaaaaatacgagtgcatggtgtgctgtgaattggttcgtgtcacggccccagtgtggagttgtcagagctgttaccatgtgtttcatttgaactgcataaagaaatgggcaaggtctccagcatctcaagcagatggccagagtggttggaggtgccctgcctgtcagaatgtttctgcacatgttcctaatacctacacttgtttctgtggcaaggtaaagaatcctgagtggagcagaaatgaaattccacatagctgtggtgaggtttgtagaaagaaacagcctggccaggactgcccacattcctgtaaccttctctgccatccaggaccctgcccaccctgccctgcctttatgacaaaaacatgtgaatgtggacgaaccaggcacacagttcgctgtggtcaggctgtctcagtccactgttctaacccatgtgagaatattttgaactgtggtcagcaccagtgtgctgagctgtgccatgggggtcagtgccagccttgccagatcattttgaaccaggtatgctattgcggcagcacctcccgagatgtgttatgtggaaccgatgtaggaaagtctgatggatttggggatttcagctgtttaaagatatgtggcaaggacttgaaatgcggtaaccatacatgttcgcaagtgtgccaccctcagccctgccagcaatgcccacggctcccccagctggtgcgctgttgcccctgtggccaaactcctctcagccaattgctagaacttggaagtagtagtcggaaaacatgcatggaccctgtgccttcatgtggaaaagtgtgcggcaagcctctgccttgtggttccttagatttcattcatacctgtgaaaagctctgccatgaaggagactgtggaccatgctctcgcacatcagttatttcctgcagatgctctttcagaacaaaggagcttccatgtaccagtctcaaaagtgaagatgctacatttatgtgtgacaagcggtgtaacaagaaacggttgtgtggacggcataaatgtaatgagatatgctgtgtggataaggagcacaagtgtcctttgatttgtgggaggaaactccgttgtggccttcataggtgtgaagaaccttgtcatcgtggaaactgccagacatgctggcaagccagttttgatgaattaacctgccattgtggtgcatcagtgatttaccctccagttccctgtggtactaggccccctgaatgtacccaaacctgcgctagagtccatgagtgtgaccatccagtatatcattcttgtcatagtgaggagaagtgtcccccttgcactttcctaactcagaagtggtgcatgggcaagcatgagtttcggagcaacatcccctgtcacctggttgatatctcttgcggattaccctgcagtgccacgctaccatgtgggatgcacaaatgtcagagactctgtcacaaaggggagtgtcttgtggatgagccctgcaagcagccctgcaccacccccagagctgactgtggtcacccgtgtatggcaccctgccataccagctcaccctgccctgtgactgcttgtaaagctaaggtagagctacagtgtgaatgtggacgaagaaaagagatggtgatttgctctgaagcatctagtacttatcaaagaatagctgcaatctccatggcctctaagataacagacatgcagcttggaggttcagtggagatcagcaagttaattaccaaaaaggaagttcatcaagccaggctggagtgtgatgaggagtgttcagccttggaaaggaaaaagagattagcagaggcatttcatatcagtgaggattctgatcctttcaatatacgttcttcagggtcaaaattcagtgatagtttgaaagaagatgccaggaaggacttaaagtttgtcagtgacgttgagaaggaaatggaaaccctcgtggaggccgtgaataagggaaagaatagtaagaaaagccacagcttccctcccatgaacagagaccaccgccggatcatccatgacttggcccaagtttatggcctggagagcgtgagctatgacagtgaaccgaagcgcaatgtggtggtcactgccatcagggggaagtccgtttgtcctcctaccacgctgacaggtgtgcttgaaagggaaatgcaggcacggcctccaccaccgattcctcatcacagacatcagtcagacaagaatcctgggagcagtaatttacagaaaataaccaaggagccaataattgactattttgacgtccaggactaa

SEQ ID NO: 1357 - DNA, 936 bp, homo sapiens
atggcggcgctgggggtgctggagtccgacctgccaagtgccgtgacacttctgaaaaatctccaggagcaagtgatggctgtaactgcacaagtgaaatcactgacacaaaaagttcaagctggtgcctatcctacagaaaagggtctcagcttcttggaagtgaaagaccagctgctgctcatgtaccttatggatttgacccacctcattctggacaaagcctcaggaggatctcttcagggacatgatgcagttttgagactggtggagattcgcacggttttggaaaagcttcgtcccttggaccaaaagctgaagtatcaaattgacaagctgatcaagactgcagtgacaggcagccttagtgagaatgacccacttcgttttaagcctcatcccagcaatatgatgagcaagttgagctctgaggatgaggaggaagatgaagcagaagatgaccagtctgaggcttcagggaagaaatctgtgaagggagtgtctaagaaatatgttcctccacgcttggttccagtacattatgatgaaacagaagctgagcgggagaagaagcgtctagaacgagccaagagacgggcattgagcagctctgtcattcgtgaacttaaggagcagtactcagatgctccagaggaaatccgtgatgctcggcatccccatgttacccgccagagtcaggaggaccaacacaggattaactatgaggagagcatgatggtgcgtttgagcgtcagtaagcgagagaaaggacggcgaaaacgagcaaatgtcatgagctcacaacttcattcccttacacacttcagtgacatcagtgctttgacagggggaactgttcatcttgatgaggatcagaatcctattaagaagcggaagaagatacctcagaaaggtcggaagaaaaaaggtcagtga

SEQ ID NO: 1358 - DNA, 543 bp, homo sapiens
atgcggcctttgactgaagaggagacccgtgtcatgtttgagaagatagcgaaatacattggggagaatcttcaactgctggtggaccggcccgatggcacctactgtttccgtctgcacaacgaccgggtgtactatgtgagtgagaagattatgaagctggccgccaatatttccggggacaagctggtgtcgctggggacctgctttggaaaattcactaaaacccacaagtttcggttgcacgtcacagctctggattaccttgcaccttatgccaagtataaagtttggataaagcctggtgcagagcagtccttcctgtatgggaaccatgtgttgaaatctggtctgggtcgaatcactgaaaatacttctcagtaccagggcgtggtggtgtactccatggcagacatccctttgggttttggggtggcagccaaatctacacaagactgcagaaaagtagaccccatggcgattgtggtatttcatcaagcagacattggggaatatgtgcggcatgaagagacgttgacttaa

SEQ ID NO: 1359 - DNA, 2067 bp, homo sapiens
atgcaggtctccagcctcaatgaggtgaagatttacagcctcagctgcggcaagtcccttcctgagtggctttctgataggaagaagagagcgctacagaagaaagatgtagatgtccgtaggagaattgaacttattcaggactttgaaatgcctactgtgtgtaccactattaaggtgtcaaaagatggacagtacattttagcaactggaacatataaacctcgggttcgatgttatgacacctatcaattatccttgaagtttgaaaggtgtttagattcagaagttgtcacctttgaaattttgtctgatgactactcaaagattgtcttcttacataatgatagatacattgaatttcattcgcaatcaggtttttactacaaaaccagaataccaaagtttgggagagatttctcttaccactatccatcctgtgacttgtactttgttggtgcaagttctgaagtttataggttaaacttagaacaaggacgatacctgaatcctctacaaactgatgctgcggagaataatgtttgtgacataaattcagtgcatggcttgtttgccacaggaaccatagagggtagagtggagtgctgggacccaagaactcgaaacagagttggcctgttagactgcgccttaaacagtgtcacagcagattcagagataaacagtttaccaacaatctctgctttgaaatttaatggtgccttgaccatggcagttggaacaaccacagggcaggttttattatatgaccttcgatctgataagccattgctagttaaagatcaccagtatgggctgcccattaagtccgttcatttccaggattcattagatctgattttgtctgctgactctcgaattgtcaagatgtggaataagaactccggaaaaatatttacttccttggagccagagcatgaccttaatgatgtttgtctctaccccaactcaggcatgcttctgacggccaatgaaacccccaagatgggcatctattacattccagttttgggtcctgctcctcggtggtgttccttcttagacaacttgaccgaagaattagaagagaatccagaaagcacagtctatgatgattataaatttgtcaccaagaaagaccttgaaaatttagggctcacccacctcattggatctcctttcctccgggcatatatgcatgggtttttcatggatataagactctatcacaaggtgaaactgatggtaaatccatttgcttatgaagaatataggaaagataaaatacgacagaaaatagaagaaacacgtgcacagagagtccagttaaagaaattgccaaaagttaacaaagagctggcacttaaattaattgaggaagaagaggagaagcagaaatctacatggaaaaagaaagttaagagtcttcctaatattctcaccgatgatcgatttaaagttatgtttgagaaccctgacttccaagtagatgaagagagtgaagaatttaggcttctgaatccacttgtttcaaaaattagtgaaaaaaggaagaagaaactaagactcttagagcaacaagaacttcgtgaaaaagaagaggaggaagagccggaaggaaaaccaagtgatgcagaaagttcggagagttcagatgatgaaaaagcctgggttgaagaggtcaggaagcaacgcagactcctccagcaggaggaaaaagtgaagcggcaggaacgactcaaggaggaccagcagacagtcctaaagccccagttttatgagatcaaagcaggagaagaatttagaagcttcaaagattctgccacaaagcagaaactgatgaacaaaacccttgaagatcgtttgaaaattgaagcaaaaaatgggacattgagtgtatccgacaccaccgttggcagcaaacaattgacattcacgttaaagaggtctgaacagcagaagaagcaacaggaggctgagaaactgcatcgacaagaaaggaaaagactccgtcgttcggccggacacctgaagtcaagacacaaaagaggacggtcgtttcattga

SEQ ID NO: 1360 - DNA, 3504 bp, homo sapiens
atgaaagtgaacagagaaacgaagcgcctttatgtgggtggccttagccaggacatttctgaggcagacctacaaaatcagttcagcagatttggagaagtttcggatgtggagatcatcacacggaaagatgaccaaggaaacccacagaaagtttttgcatatatcaacatcagtgtagcagaagcggacctgaaaaaatgtatgtctgttttaaataaaacaaaatggaaaggtggaacattacaaattcaactagcaaaagaaagctttctgcacagattggcccaagagagagaagcagcaaaagctaagaaagaagaatcaacaacaggtaacgccaacttgttagaaaagacaggaggagtggatttccatatgaaagctgtgccagggacagaagtgccagggcataagaattgggttgtgagcaaatttggaagagtcttacctgttcttcaccttaaaaatcaacataaacgtaaaatcatcaaatatgatccctcaaaatactgccacaacctgaagaagataggggaggatttctcaaacaccattcctatatccagcctgacttgggaattagaaggagggaatgaccctatgagtaagaaacggcgaggagagttctctgactttcatggccctcccaagaagataataaaagtgcagaaggatgagagttccactgggtctctggccatgagtacaaggcccaggagggtaatagagagaccacccttaacacagcaacaggctgcacaaaaaagaacttgtgattccattactccttctaaatcatctcctgtacctgtttctgatactcagaaacttaaaaatctaccttttaagacttctggcttggaaactgccaagaagagaaacagcatttctgatgatgatactgattctgaagatgaattgagaatgatgattgcgaaagaggaaaacttacagagaactacacaaccctcaataaatgaatctgaaagtgatccttttgaagttgtaagggatgatttcaaatcaggcgttcacaaactgcattctttaataggtttaggtatcaaaaatcgtgtctcttgccatgatagtgatgatgatattatgagaaatgatcgtgagtatgactcaggagatacagatgaaattattgcgatgaaaaaaaatgttgctaaggtcaaaaacagtacagaattttcacaaatggaaaaatctacgaagaaaacttctttcaaaaatagagaaaactgtgagctttctgatcactgtattaaactacaaaaaagaaaaagcaatgtagagtcagccctcagtcatggattaaagtctcttaatcgtaaatctccctctcactccagtagcagtgaagatgctgattctgcatcagaattagctgactctgaaggaggtgaggagtataatgccatgatgaaaaactgccttcgtgtgaatctcactttagctgatttggaacaattggctggcagtgatctgaaggttccaaatgaagatactaagagtgatggaccagaaaccaccacccaatgcaagtttgacagaggctccaagagccccaagactcccactggcctccgcagaggccgacagtgtattcgtcctgcggagattgtggcttccctgttagaaggagaggagaacacctgtggcaaacagaaaccaaaggaaaacaatttaaagccaaaatttcaggctttcaagggagtaggctgtctatatgaaaaggagtcaatgaaaaaatccttgaaagacagtgttgcctctaacaataaagatcagaattccatgaaacatgaggatcccagtatcatatccatggaagatgggtccccatatgttaatggctcattaggtgaagtgactccatgccaacatgcaaagaaggcgaatggcccaaactatattcagcctcaaaaaagacagaccacttttgaaagccaggatcgcaaggcagtgtcccctagcagttctgaaaagagaagtaagaatcctatttctaggccattagaaggtaagaagtccttaagtcttagtgcaaagactcacaacataggctttgacaaagacagctgccatagtaccacaaagacagaagcttcacaggaagagcggtctgattcaagcggcctcacatctctcaagaaatcaccaaaggtctcatccaaggacactcgggaaatcaaaactgatttctcactttctattagtaattcgtcagatgtgagtgctaaagataagcatgctgaagacaatgagaagcgtttggcagccttggaagcgaggcaaaaagcaaaagaagtgcagaagaagctggtgcataatgctctggcaaatttggatggtcatccagaggataagccaacgcacatcatcttcggttctgacagtgaatgtgaaacagaggagacatcgactcaggagcagagccatccaggagaggaatgggtgaaagagtctatgggtaaaacatcagggaagctgtttgatagcagtgatgatgacgaatctgattctgaagatgacagtaataggttcaaaattaaacctcagtttgagggcagagctggacagaagctcatggatttacagtcgcactttggcaccgatgacagattccgcatggactctcgatttctagaaactgacagtgaagaggaacaggaagaggtaaatgaaaagaaaactgctgaggaagaagagcttgctgaagaaaaaaagaaagccctgaatgttgtacaaagtgttttgcaaatcaacttaagcaattctacaaacagaggatcagtagctgctaagaaatttaaggacatcatacattatgatccaacgaagcaagaccatgccacttacgaaagaaaaagagatgataagccaaaagaaagtaaagcaaaacgaaaaaagaaaagggaggaagctgagaaactacctgaggtgtctaaagaaatgtattataatattgctatggatctgaaagaaatattccaaactacaaaatataccagtgaaaaggaagagggcacaccctggaatgaggactgtggtaaagagaaacctgaggaaatccaggaccctgcagctctgaccagtgacgctgagcagcccagcgggttcacgttctctttttttgattcagacactaaagacataaaggaagagacctacagagttgaaacagtgaaacctggaaagattgtctggcaggaagaccctcgtttacaagacagcagttcagaagaggaagatgttactgaagaaacagatcacagaaactccagtcctggagaagcatcattacttgagaaagagaccactagatttttctttttctctaagaatgatgaacgacttcaaggttctgacttattctggagaggagtaggaagtaatatgagcaggaactcttgggaggccagaacaaccaacctgcgtatggattgtcgaaagaaacataaagacgcaaaaaggaaaatgaaaccaaaataa

SEQ ID NO: 1361 - DNA, 7416 bp, homo sapiens
atgcccgccctgcgccccgctctgctgtgggcgctgctggcgctctggctgtgctgcgcggcccccgcgcatgcattgcagtgtcgagatggctatgaaccctgtgtaaatgaaggaatgtgtgttacctaccacaatggcacaggatactgcaaatgtccagaaggcttcttgggggaatattgtcaacatcgagacccctgtgagaagaaccgctgccagaatggtgggacttgtgtggcccaggccatgctggggaaagccacgtgccgatgtgcctcagggtttacaggagaggactgccagtactcaacatctcatccatgctttgtgtctcgaccctgcctgaatggcggcacatgccatatgctcagccgggatacctatgagtgcacctgtcaagtcgggtttacaggtaaggagtgccaatggacggatgcctgcctgtctcatccctgtgcaaatggaagtacctgtaccactgtggccaaccagttctcctgcaaatgcctcacaggcttcacagggcagaaatgtgagactgatgtcaatgagtgtgacattccaggacactgccagcatggtggcacctgcctcaacctgcctggttcctaccagtgccagtgccctcagggcttcacaggccagtactgtgacagcctgtatgtgccctgtgcaccctcaccttgtgtcaatggaggcacctgtcggcagactggtgacttcacttttgagtgcaactgccttccaggttttgaagggagcacctgtgagaggaatattgatgactgccctaaccacaggtgtcagaatggaggggtttgtgtggatggggtcaacacttacaactgccgctgtcccccacaatggacaggacagttctgcacagaggatgtggatgaatgcctgctgcagcccaatgcctgtcaaaatgggggcacctgtgccaaccgcaatggaggctatggctgtgtatgtgtcaacggctggagtggagatgactgcagtgagaacattgatgattgtgccttcgcctcctgtactccaggctccacctgcatcgaccgtgtggcctccttctcttgcatgtgcccagaggggaaggcaggtctcctgtgtcatctggatgatgcatgcatcagcaatccttgccacaagggggcactgtgtgacaccaaccccctaaatgggcaatatatttgcacctgcccacaaggctacaaaggggctgactgcacagaagatgtggatgaatgtgccatggccaatagcaatccttgtgagcatgcaggaaaatgtgtgaacacggatggcgccttccactgtgagtgtctgaagggttatgcaggacctcgttgtgagatggacatcaatgagtgccattcagacccctgccagaatgatgctacctgtctggataagattggaggcttcacatgtctgtgcatgccaggtttcaaaggtgtgcattgtgaattagaaataaatgaatgtcagagcaacccttgtgtgaacaatgggcagtgtgtggataaagtcaatcgtttccagtgcctgtgtcctcctggtttcactgggccagtttgccagattgatattgatgactgttccagtactccgtgtctgaatggggcaaagtgtatcgatcacccgaatggctatgaatgccagtgtgccacaggtttcactggtgtgttgtgtgaggagaacattgacaactgtgaccccgatccttgccaccatggtcagtgtcaggatggtattgattcctacacctgcatctgcaatcccgggtacatgggcgccatctgcagtgaccagattgatgaatgttacagcagcccttgcctgaacgatggtcgctgcattgacctggtcaatggctaccagtgcaactgccagccaggcacgtcaggggttaattgtgaaattaattttgatgactgtgcaagtaacccttgtatccatggaatctgtatggatggcattaatcgctacagttgtgtctgctcaccaggattcacagggcagagatgtaacattgacattgatgagtgtgcctccaatccctgtcgcaagggtgcaacatgtatcaacggtgtgaatggtttccgctgtatatgccccgagggaccccatcaccccagctgctactcacaggtgaacgaatgcctgagcaatccctgcatccatggaaactgtactggaggtctcagtggatataagtgtctctgtgatgcaggctgggttggcatcaactgtgaagtggacaaaaatgaatgcctttcgaatccatgccagaatggaggaacttgtgacaatctggtgaatggatacaggtgtacttgcaagaagggctttaaaggctataactgccaggtgaatattgatgaatgtgcctcaaatccatgcctgaaccaaggaacctgctttgatgacataagtggctacacttgccactgtgtgctgccatacacaggcaagaattgtcagacagtattggctccctgttccccaaacccttgtgagaatgctgctgtttgcaaagagtcaccaaattttgagagttatacttgcttgtgtgctcctggctggcaaggtcagcggtgtaccattgacattgacgagtgtatctccaagccctgcatgaaccatggtctctgccataacacccagggcagctacatgtgtgaatgtccaccaggcttcagtggtatggactgtgaggaggacattgatgactgccttgccaatccttgccagaatggaggttcctgtatggatggagtgaatactttctcctgcctctgccttccgggtttcactggggataagtgccagacagacatgaatgagtgtctgagtgaaccctgtaagaatggagggacctgctctgactacgtcaacagttacacttgcaagtgccaggcaggatttgatggagtccattgtgagaacaacatcaatgagtgcactgagagctcctgtttcaatggtggcacatgtgttgatgggattaactccttctcttgcttgtgccctgtgggtttcactggatccttctgcctccatgagatcaatgaatgcagctctcatccatgcctgaatgagggaacgtgtgttgatggcctgggtacctaccgctgcagctgccccctgggctacactgggaaaaactgtcagaccctggtgaatctctgcagtcggtctccatgtaaaaacaaaggtacttgcgttcagaaaaaagcagagtcccagtgcctatgtccatctggatgggctggtgcctattgtgacgtgcccaatgtctcttgtgacatagcagcctccaggagaggtgtgcttgttgaacacttgtgccagcactcaggtgtctgcatcaatgctggcaacacgcattactgtcagtgccccctgggctatactgggagctactgtgaggagcaactcgatgagtgtgcgtccaacccctgccagcacggggcaacatgcagtgacttcattggtggatacagatgcgagtgtgtcccaggctatcagggtgtcaactgtgagtatgaagtggatgagtgccagaatcagccctgccagaatggaggcacctgtattgaccttgtgaaccatttcaagtgctcttgcccaccaggcactcggggcctactctgtgaagagaacattgatgactgtgcccggggtccccattgccttaatggtggtcagtgcatggataggattggaggctacagttgtcgctgcttgcctggctttgctggggagcgttgtgagggagacatcaacgagtgcctctccaacccctgcagctctgagggcagcctggactgtatacagctcaccaatgactacctgtgtgtttgccgtagtgcctttactggccggcactgtgaaaccttcgtcgatgtgtgtccccagatgccctgcctgaatggagggacttgtgctgtggccagtaacatgcctgatggtttcatttgccgttgtcccccgggattttccggggcaaggtgccagagcagctgtggacaagtgaaatgtaggaagggggagcagtgtgtgcacaccgcctctggaccccgctgcttctgccccagtccccgggactgcgagtcaggctgtgccagtagcccctgccagcacgggggcagctgccaccctcagcgccagcctccttattactcctgccagtgtgccccaccattctcgggtagccgctgtgaactctacacggcaccccccagcacccctcctgccacctgtctgagccagtattgtgccgacaaagctcgggatggcgtctgtgatgaggcctgcaacagccatgcctgccagtgggatgggggtgactgttctctcaccatggagaacccctgggccaactgctcctccccacttccctgctgggattatatcaacaaccagtgtgatgagctgtgcaacacggtcgagtgcctgtttgacaactttgaatgccaggggaacagcaagacatgcaagtatgacaaatactgtgcagaccacttcaaagacaaccactgtgaccaggggtgcaacagtgaggagtgtggttgggatgggctggactgtgctgctgaccaacctgagaacctggcagaaggtaccctggttattgtggtattgatgccacctgaacaactgctccaggatgctcgcagcttcttgcgggcactgggtaccctgctccacaccaacctgcgcattaagcgggactcccagggggaactcatggtgtacccctattatggtgagaagtcagctgctatgaagaaacagaggatgacacgcagatcccttcctggtgaacaagaacaggaggtggctggctctaaagtctttctggaaattgacaaccgccagtgtgttcaagactcagaccactgcttcaagaacacggatgcagcagcagctctcctggcctctcacgccatacaggggaccctgtcataccctcttgtgtctgtcgtcagtgaatccctgactccagaacgcactcagctcctctatctccttgctgttgctgttgtcatcattctgtttattattctgctgggggtaatcatggcaaaacgaaagcgtaagcatggctctctctggctgcctgaaggtttcactcttcgccgagatgcaagcaatcacaagcgtcgtgagccagtgggacaggatgctgtggggctgaaaaatctctcagtgcaagtctcagaagctaacctaattggtactggaacaagtgaacactgggtcgatgatgaagggccccagccaaagaaagtaaaggctgaagatgaggccttactctcagaagaagatgaccccattgatcgacggccatggacacagcagcaccttgaagctgcagacatccgtaggacaccatcgctggctctcacccctcctcaggcagagcaggaggtggatgtgttagatgtgaatgtccgtggcccagatggctgcaccccattgatgttggcttctctccgaggaggcagctcagatttgagtgatgaagatgaagatgcagaggactcttctgctaacatcatcacagacttggtctaccagggtgccagcctccaggcccagacagaccggactggtgagatggccctgcaccttgcagcccgctactcacgggctgatgctgccaagcgtctcctggatgcaggtgcagatgccaatgcccaggacaacatgggccgctgtccactccatgctgcagtggcagctgatgcccaaggtgtcttccagattctgattcgcaaccgagtaactgatctagatgccaggatgaatgatggtactacacccctgatcctggctgcccgcctggctgtggagggaatggtggcagaactgatcaactgccaagcggatgtgaatgcagtggatgaccatggaaaatctgctcttcactgggcagctgctgtcaataatgtggaggcaactcttttgttgttgaaaaatggggccaaccgagacatgcaggacaacaaggaagagacacctctgtttcttgctgcccgggaggggagctatgaagcagccaagatcctgttagaccattttgccaatcgagacatcacagaccatatggatcgtcttccccgggatgtggctcgggatcgcatgcaccatgacattgtgcgccttctggatgaatacaatgtgaccccaagccctccaggcaccgtgttgacttctgctctctcacctgtcatctgtgggcccaacagatctttcctcagcctgaagcacaccccaatgggcaagaagtctagacggcccagtgccaagagtaccatgcctactagcctccctaaccttgccaaggaggcaaaggatgccaagggtagtaggaggaagaagtctctgagtgagaaggtccaactgtctgagagttcagtaactttatcccctgttgattccctagaatctcctcacacgtatgtttccgacaccacatcctctccaatgattacatcccctgggatcttacaggcctcacccaaccctatgttggccactgccgcccctcctgccccagtccatgcccagcatgcactatctttttctaaccttcatgaaatgcagcctttggcacatggggccagcactgtgcttccctcagtgagccagttgctatcccaccaccacattgtgtctccaggcagtggcagtgctggaagcttgagtaggctccatccagtcccagtcccagcagattggatgaaccgcatggaggtgaatgagacccagtacaatgagatgtttggtatggtcctggctccagctgagggcacccatcctggcatagctccccagagcaggccacctgaagggaagcacataaccacccctcgggagcccttgccccccattgtgactttccagctcatccctaaaggcagtattgcccaaccagcgggggctccccagcctcagtccacctgccctccagctgttgcgggccccctgcccaccatgtaccagattccagaaatggcccgtttgcccagtgtggctttccccactgccatgatgccccagcaggacgggcaggtagctcagaccattctcccagcctatcatcctttcccagcctctgtgggcaagtaccccacacccccttcacagcacagttatgcttcctcaaatgctgctgagcgaacacccagtcacagtggtcacctccagggtgagcatccctacctgacaccatccccagagtctcctgaccagtggtcaagttcatcaccccactctgcttctgactggtcagatgtgaccaccagccctacccctgggggtgctggaggaggtcagcggggacctgggacacacatgtctgagccaccacacaacaacatgcaggtttatgcgtga

SEQ ID NO: 1362 - DNA, 1812 bp, homo sapiens
atggcaaccatagaagaaattgcacatcaaattattgaacaacagatgggagagattgttacagagcagcaaactgggcagaaaatccagattgtgacagcacttgatcataatacccaaggcaagcagttcattctgacaaatcacgacggctctactccaagcaaagtcattctggccaggcaagattccactccgggaaaagttttccttacaactccagatgcagcaggtgtcaaccagttattttttaccactcctgatctgtctgcacaacacctgcagctcctaacagataattctccagaccaaggaccaaataaggtttttgatctttgcgtagtatgtggagacaaagcatcaggacgtcattatggagcagtaacttgtgaaggctgcaaaggattttttaaaagaagcatccgaaaaaatttagtatattcatgtcgaggatcaaaggattgtattattaataagcaccaccgaaaccgctgtcaatactgcaggttacagagatgtattgcgtttggaatgaagcaagactctgtccaatgtgaaagaaaacccattgaagtatcacgagaaaaatcttccaactgtgccgcttcaacagaaaaaatctatatccgaaaggaccttcgtagcccattaactgcaactccaacttttgtaacagatagtgaaagtacaaggtcaacaggactgttagattcaggaatgttcatgaatattcatccatctggagtaaaaactgagtcagctgtgctgatgacatcagataaggctgaatcatgtcagggagatttaagtacattggccaatgtggttacatcattagcgaatcttggaaaaactaaagatctttctcaaaatagtaatgaaatgtctatgattgaaagcttaagcaatgatgatacctctttgtgtgaatttcaagaaatgcagaccaacggtgatgtttcaagggcatttgacactcttgcaaaagcattgaatcctggagagagcacagcctgccagagctcagtagcgggcatggaaggaagtgtacacctaatcactggagattcaagcataaattacaccgaaaaagaggggccacttctcagcgattcacatgtagctttcaggctcaccatgccttctcctatgcctgagtacctgaatgtgcactacattggggagtctgcctccagactgctgttcttatcaatgcactgggcactttcgattccttctttccaggctctagggcaagaaaacagcatatcactggtgaaagcttactggaatgaactttttactcttggtcttgcccagtgctggcaagtgatgaatgtagcaactatattagcaacatttgtcaattgtcttcacaatagtcttcaacaagataaaatgtcaacagaaagaagaaaattattgatggagcacatcttcaaactacaggagttttgtaacagcatggttaaactctgcattgatggatacgaatatgcctacctgaaggcaatagtactcttcagtccagatcatccaagcctagaaaacatggaacagatagagaaatttcaggaaaaggcttatgtggaattccaagattatataaccaaaacatatccagatgacacctacaggttatccagactactactcagattgccagctttaagactgatgaatgctaccatcactgaagaattgtttttcaaaggtctcattggcaatatacgaattgacagtgttatcccacatattttgaaaatggagcctgcagattataactctcaaataattggtcacagcatttga

SEQ ID NO: 1363 - DNA, 1257 bp, homo sapiens
atgttttctcctgatcaagaaaatcatccatctaaagcaccagtaaaatatggtgaactcattgtcttagggtataatgggtctctcccaaatggcgatagaggaaggaggaaaagtaggtttgctttgtttaaaagacctaaggcaaatggggtgaagcccagcactgtgcatattgcttgtactcctcaggctgcaaaggcaataagcaacaaagaccagcatagcatatcatatactttatctcgggcccagactgtggtggttgaatatactcatgacagcaacaccgatatgtttcagattggccggtcgactgaaagccccattgattttgtagtaactgacacggttcctggaagtcaaagtaattctgatacacagtcagtacaaagcactatatcaagatttgcctgcagaatcatatgtgaacggaatcctccctttacagcacggatttatgctgcaggatttgactcatcaaaaaacatctttcttggggagaaggctgccaaatggaagacatcagatggacagatggatggcttgaccactaatggtgttcttgtgatgcatccacgcaatgggttcacagaagactccaagcctggaatatggagagaaatatcggtgtgtggaaatgtatttagcctacgtgaaaccagatcggctcagcagagaggaaaaatggtggaaattgaaaccaatcagttacaagatggctcgttaattgacctctgtggtgcaacattgttatggcgtactgcagaaggcctttcccacactcctaccgtgaagcatttagaagctttaagacaggaaatcaatgcagcacgacctcagtgccctgtagggttcaacacactagcatttcctagtatgaagaggaaagacgttgtagatgaaaaacaaccatgggtatatctaaactgcggccatgtacatggctatcataactggggaaacaaagaagaacgtgatggaaaagatcgtgaatgtcctatgtgtaggtctgttggtccctatgttcctctgtggcttggatgtgaagctggattttatgtggacgccggccctccaacccatgcgtttagcccgtgtgggcatgtgtgttcagaaaagacaactgcctattggtcccagatcccacttcctcatggtactcatacttttcatgcagcctgtcccttttgtgcacatcagttggctggtgaacaaggctacatcagacttatttttcaaggacctctagactaa

SEQ ID NO: 1364 - DNA, 3852 bp, homo sapiens
atgtggggcagcgatcgcctggcgggtgctgggggaggcggggcggcagtgactgtggccttcaccaacgctcgcgactgcttcctccacctgccgcggcgtctcgtggcccagctgcatctgctgcagaatcaagctatagaagtggtctggagtcaccagcctgcattcttgagctgggtggaaggcaggcattttagtgatcaaggtgaaaatgtggctgaaattaacagacaagttggtcaaaaacttggactctcaaatgggggacaggtatttctcaagccatgttcccatgtggtatcttgtcaacaagttgaggtggaacccctctcagcagatgattgggagatactggagctgcatgctgtttcccttgaacaacatcttctagatcaaattcgaatagtttttccaaaagccatttttcctgtttgggttgatcaacaaacgtacatatttatccaaattgttgcactaataccagctgcctcttatggaaggctggaaactgacaccaaactccttattcagccaaagacacgccgagccaaagagaatacattttcaaaagctgatgctgaatataaaaaacttcatagttatggaagagaccagaaaggaatgatgaaagaacttcaaaccaagcaacttcagtcaaatactgtgggaatcactgaatctaatgaaaacgagtcagagattccagttgactcatcatcagtagcaagtttatggactatgataggaagcattttttcctttcaatctgagaagaaacaagagacatcttggggtttaactgaaatcaatgcattcaaaaatatgcagtcaaaggttgttcctctagacaatattttcagagtatgcaaatctcaacctcctagtatatataacgcgtcagcaacctctgtttttcataaacactgtgccattcatgtatttccatgggaccaggaatattttgatgtagagcccagctttactgtgacatatggaaagctagttaagctactttctccaaagcaacagcaaagtaaaacaaaacaaaatgtgttatcacctgaaaaagagaagcagatgtcagagccactagatcaaaaaaaaattaggtcagatcataatgaagaagatgagaaggcctgtgtgctacaagtagtctggaatggacttgaagaattgaacaatgccatcaaatataccaaaaatgtagaagttctccatcttgggaaagtctggattccagatgacctgaggaagagactaaatatagaaatgcatgccgtagtcaggataactccagtggaagttacccctaaaattccaagatctctaaagttacaacctagagagaatttacctaaagacataagtgaagaagacataaaaactgtattttattcatggctacagcagtctactaccaccatgcttcctttggtaatatcagaggaagaatttattaagctggaaactaaagatggactgaaggaattttctctgagtatagttcattcttgggaaaaagaaaaagataaaaatatttttctgttgagtcccaatttgctgcagaagactacaatacaagtccttctagatcctatggtaaaagaagaaaacagtgaggaaattgactttattcttccttttttaaagctgagctctttgggaggagtgaattccttaggcgtatcctccttggagcacatcactcacagcctcctgggacgccctttgtctcggcagctgatgtctcttgttgcaggacttaggaatggagctcttttactcacaggaggaaagggaagtggaaaatcaactttagccaaagcaatctgtaaagaagcatttgacaaactggatgcccatgtggagagagttgactgtaaagctttacgaggaaaaaggcttgaaaacatacaaaaaaccctagaggtggctttctcagaggcagtgtggatgcagccatctgttgtcctgctggatgaccttgacctcattgctggactgcctgctgtcccggaacatgagcacagtcctgatgcggtgcagagccagcggcttgctcatgctttgaatgatatgataaaagagtttatctccatgggaagtttggttgcactgattgccacaagtcagtctcagcaatctctacatcctttacttgtttctgctcaaggagttcacatatttcagtgcgtccaacacattcagcctcctaatcaggaacaaagatgtgaaattctgtgtaatgtaataaaaaataaattggactgtgatataaacaagttcaccgatcttgacctgcagcatgtagctaaagaaactggcgggtttgtggctagagattttacagtacttgtggatcgagccatacattctcgactctctcgtcagagtatatccaccagagaaaaattagttttaacaacattggacttccaaaaggctctccgcggatttcttcctgcgtctttgcgaagtgtcaacctgcataaacctagagacctgggttgggacaagattggtgggttacatgaagttaggcagatactcatggatactatccagttacctgccaagtatccagaattatttgcaaacttgcccatacgacaaagaacaggaatactgttgtatggtccgcctggaacaggaaaaaccttactagctggggtaattgcacgagagagtagaatgaattttataagtgtcaaggggccagagttactcagcaaatacattggagcaagtgaacaagctgttcgggatatttttattagagcacaggctgcaaagccctgcattcttttctttgatgaatttgaatccattgctcctcggcggggtcatgataatacaggagttacagaccgagtagttaaccagttgctgactcagttggatggagtagaaggcttacagggtgtttatgtattggctgctactagtcgccctgacttgattgaccctgccctgcttaggcctggtcgactagataaatgtgtatactgtcctcctcctgatcaggtgtcacgtcttgaaattttaaatgtcctcagtgactctctacctctggcagatgatgttgaccttcagcatgtagcatcagtaactgactcctttactggagctgatctgaaagctttactttacaatgcccaattggaggccttacatggaatgctgctctcgagtggactccaggatggaagttccagctctgatagtgacctaagtctgtcttcaatggtctttcttaaccatagcagtggctctgacgattcagctggagatggagaatgtggcttagatcagtcccttgtttctttagagatgtccgagatccttccagatgaatcaaaattcaatatgtaccggctctactttggaagctcttatgaatcagaacttggaaatggaacctcttctgatttgagctcacaatgtctctctgcaccaagctccatgactcaggatttgcctggagttcctgggaaagaccagttgttttcacagcctccagtgttaaggacagcttcacaagagggttgccaagaacttacacaagaacaaagagatcaactgagggcagatatcagtattatcaaaggcagataccggagccaaagtggagaggacgaatccatgaaccaaccaggaccaatcaaaaccagactggctattagtcagtcacatttaatgactgcacttggtcacacaagaccatccattagtgaagatgactggaagaattttgctgagctatatgaaagctttcaaaatccaaagaggagaaaaaatcaaagtggaacaatgtttcgacctggacagaaagtaactttagcataa

SEQ ID NO: 1365 - DNA, 2988 bp, homo sapiens
atggcggaagcggaatttaaggaccatagtacagctatggatactgaaccaaacccgggaacatcttctgtgtcaacaacaaccagcagtaccaccaccaccaccatcaccacttcctcctctcgaatgcagcagccacagatctctgtctacagtggttcagaccgacatgctgtacaggtaattcaacaggcattgcatcggccccccagctcagctgctcagtaccttcagcaaatgtatgcagcccaacaacagcacttgatgctgcatactgcagctcttcagcagcagcatttaagcagctcccagcttcagagccttgctgctgttcaggcaagtttgtccagtggaagaccatctacatctcccacaggaagtgtcacacagcagtcaagtatgtcccaaacgtctatcaacctctccacttctcctacacctgcacagttaataagccgttcccaggcttccagttctaccagcggcagtattacccaacagactatgttactagggagtacttcccctaccctaacggcaagccaagctcaaatgtatctccgagctcaaatgctgattttcacacccgctaccactgtggctgctgtacagtctgacattcctgttgtctcgtcgtcatcgtcatcttcctgtcagtctgcagctactcaggttcagaatttaacattacgcagccagaagttgggtgtattatctagctcacagaatggtccaccaaaaagcactagtcaaactcagtcattgacaatttgtcataacaaaacaacagtgaccagttctaaaatcagccaacgagatccttctccagaaagtaataagaaaggagagagcccaagcctggaatcacgaagcacagctgtcacccggacatcaagtattcaccagttaatagcaccagcttcatattctccaattcagcctcattctctaataaaacatcagcagattcctcttcattcaccaccttccaaagtttcccatcatcagctgatattacaacagcagcaacagcaaattcagccaatcacacttcagaattcaactcaagacccacccccatcccagcactgtataccactccagaaccatggccttcctccagctcccagtaatgcccagtcacagcattgttcaccgattcagagtcatccctctcctttaacagtgtctcctaatcagtcacagtcagcacagcagtctgtagtggtgtctcctccaccacctcattcaccaagtcagtctcctactataattattcatccacaagcacttattcagccacaccctcttgtgtcatcagctctccagccagggccaaatttgcagcagtccactgctaatcaggtgcaagctacagcacagttgaatcttccatcccatcttccacttccagcttcccctgttgtacacattggcccagttcagcagtctgccttggtatccccaggccagcagattgtctctccatcacaccagcaatattcatccctgcagtcctctccaatcccaattgcaagtcctccacagatgtcgacatctcctccagctcagattccaccactgcccttgcagtctatgcagtctttacaagtgcagcctgaaattctgtcccagggccaggttttggtgcagaatgctttggtgtcagaagaggaacttccagctgcagaagctttggtccagttgccatttcagactcttcctcctccacagactgttgcggtaaacctacaagtgcaaccaccagcacctgttgatccaccagtggtttatcaggtagaagatgtgtgtgaagaagaaatgccagaagagtcagatgaatgtgtccggatggatagaaccccaccaccacccactttgtctccagcagctataacagtggggagaggagaagatttgacttctgaacatcctttgttagagcaagtggaattacctgctgtggcatcagtcagtgcttcagtaattaaatctccatcagatccctcacatgtttctgttccaccacctccattgttacttccagctgccaccacaaggagtaacagtacatctatgcacagtagcattcccagtatagagaacaaacctccacaggctattgttaaaccacagatcctaacccatgttattgaaggctttgtgattcaggagggattggagccatttcctgtgagtcgttcctctttgctaatagaacagcctgtgaaaaaacggcctcttttggataatcaggtgataaattcagtgtgtgttcagccagagctacagaataatacaaaacatgcggataattcatctgacacagagatggaagacatgattgctgaagagacattagaagaaatggacagtgagttgctcaagtgtgaattctgtgggaaaatgggatatgctaatgaatttttgcggtcaaaacgattctgcactatgtcatgtgccaaaaggtacaatgttagctgttctaaaaaatttgcacttagtcgttggaatcgtaagcctgataatcaaagtcttgggcatcgtggccgtcgtccaagtggccctgatggggcagcgagagaacatatccttaggcagcttccaattacttatccatctgcagaagaagacttggcttctcatgaagattctgtgccatctgctatgacaactcgtctgcgcaggcagagcgagcgggaaagagaacgtgagcttcgggatgtgagaattcggaaaatgcctgagaacagtgacttgctaccagttgcacaaacagagccatctatatggacagttgatgatgtctgggccttcatccattctttgcctggctgccaggatatcgcagatgaattcagagcacaggagattgatggacaggcccttctcttgctgaaagaagaccatctcatgagtgcaatgaatatcaagctaggcccagccctgaagatctgtgcacgcatcaactctctgaaggaatcttaa

SEQ ID NO: 1366 - DNA, 3006 bp, homo sapiens
atgccaacagagaagaagatcagcagtgcaagtgattgtattaattcaatggttgagggttcagaactcaaaaaggttcgctccaactctagaatttatcataggtactttttactggatgctgacatgcagagcctaaggtgggagccatctaagaaggattctgagaaagccaagattgacattaaatccatcaaggaagtgagaacaggaaaaaacacagacatattccgcagcaatggcatttctgaccagatatctgaagattgtgcgttttccgtcatatatggagagaattatgagtcactggatttggttgccaactccgcagatgttgcaaacatctgggttacaggactgcggtacctaatttcttatggaaaacatacacttgatatgttagaaagtagccaagataacatgaggacttcttgggtttcacaaatgtttagtgaaattgatgtagataaccttggacatataactctgtgtaatgctgtgcaatgtatcagaaacctcaatcctggtttaaaaacgagcaaaattgagcttaagttcaaagaattgcataaatcaaaggacaaagctggtaccgaggtcacaaaggaagaatttattgaggtttttcatgagctttgtactagacctgaaatttatttccttttagttcagttttcaagcaataaagaattccttgataccaaggaccttatgatgtttcttgaggcagaacagggtgtggcacatataaatgaggaaataagccttgaaattattcacaaatatgaaccatccaaagagggtcaggaaaagggctggctctccatagacgggttcactaattaccttatgtcacctgactgttatatattcgatccagaacataagaaggtctgtcaggatatgaagcaacctctgtctcattactttataaactcatctcataatacatacttaatagaggatcagttccgaggtccctccgacatcacaggatatattcgagctcttaaaatgggttgccggagtgttgaattagatgtatgggatgggccggacaatgaacctgtaatttacacaggccacaccatgacctctcagatagttttccgcagtgtcattgatattattaacaagtatgcattctttgcttcagagtatcctcttatcttgtgtttagaaaaccactgttccattaaacaacagaaggtaatggttcagcacatgaagaaacttttaggagacaagctctatacaacatcacccaatgttgaggaatcttatctaccatccccagatgtcctgaaagggaaaatactaattaaagcaaagaagctgtcctcaaattgctctggggtagaaggagatgttactgacgaagatgaaggagcagaaatgtctcagaggatgggaaaagagaacatggagcaacccaataatgtgcctgtgaagcgatttcagctttgtaaagaactgtctgaactggtcagcatctgcaaatcagttcagttcaaagaatttcaggtgtcgtttcaggttcagaagtactgggaagtctgttcctttaatgaagtgcttgccagcaagtacgccaatgaaaatccaggggactttgtaaattacaacaaacgttttcttgctagggtttttcccagtccaatgagaattgattccagtaacatgaatcctcaagatttttggaaatgtggttgccaaattgtagccatgaactttcagacaccaggactgatgatggacctgaatattggctggtttaggcagaacggaaactgtggctatgtcctccggccagccatcatgagggaggaggtctccttcttcagcgccaatacaaaagactctgtcccaggggtctcacctcaacttcttcacattaaaatcatcagtgggcagaactttcccaagcccaaaggatcaggtgccaaaggtgatgtggtagatccttatgtctatgttgaaatccatggaatccctgctgattgtgcagaacaaaggacaaaaacagtgcaccagaatggagacgctcccatttttgatgaaagctttgaatttcaaatcaacctgcctgaactggccatggtgcgctttgtagtgctggatgatgactacattggggatgaattcatcggccagtacacaattccctttgaatgtttacagacgggctaccgccatgtccccctgcagtccttaactggagaggtccttgcacatgcttctttatttgtccacgtggctattactaaccgaagaggaggaggaaagcctcataaaaggggcctttctgtgagaaaagggaagaaatccagggaatatgcatctttgagaacactgtggattaaaaccgtggatgaggtattcaagaatgcccagccccctatacgggatgccacagatctgagagaaaacatgcagaatgcggtggtgtcattcaaggagctgtgtggcctctcctctgtggccaatctcatgcagtgcatgttggcggtgtctccccgctttctggggcccgataacacacccctagtggtcctaaatctcagcgagcagtaccccacaatggagctgcagggaattgtgccggaggttctgaagaagatcgtaacaacttatgacatgatgattcagtccctcaaggcgttgattgaaaatgcagatgctgtatatgaaaagatcgtacattgtcagaaggcagccatggaattccatgaacacttgcacagcataggcaccaaggaaggtttgaaggaaagaaaactacaaaaagcagtggagagctttacctggaatattaccatcttaaagggacaagcagatcttttgaaatatgctaagaatgagacattggagaacctgaaacaaatccattttgctgctgtttcatgtggactgaataaaccaggcaccgaaaatgctgatgtccagaagccacgccggagcttggaagtcatacccgaaaaagcaaacgatgaaactggagaatga

SEQ ID NO: 1367 - DNA, 5913 bp, homo sapiens
atgcacgggggtggccccccctcgggggacagcgcatgcccgctgcgcaccatcaagagagtccagttcggagtcctgagtccggatgaactgaagcgaatgtctgtgacggagggtggcatcaaatacccagagacgactgagggaggccgccccaagcttggggggctgatggacccgaggcagggggtgattgagcggactggccgctgccaaacatgtgcaggaaacatgacagagtgtcctggccactttggccacattgaactggccaagcctgtgtttcacgtgggcttcctggtgaagacaatgaaagttttgcgctgtgtctgcttcttctgctccaaactgcttgtggactctaacaacccaaagatcaaggatatcctggctaagtccaagggacagcccaagaagcggctcacacatgtctacgacctttgcaagggcaaaaacatatgcgagggtggggaggagatggacaacaagttcggtgtggaacaacctgagggtgacgaggatctgaccaaagaaaagggccatggtggctgtgggcggtaccagcccaggatccggcgttctggcctagagctgtatgcggaatggaagcacgttaatgaggactctcaggagaagaagatcctgctgagtccagagcgagtgcatgagatcttcaaacgcatctcagatgaggagtgttttgtgctgggcatggagccccgctatgcacggccagagtggatgattgtcacagtgctgcctgtgcccccgctctccgtgcggcctgctgttgtgatgcagggctctgcccgtaaccaggatgacctgactcacaaactggctgacatcgtgaagatcaacaatcagctgcggcgcaatgagcagaacggcgcagcggcccatgtcattgcagaggatgtgaagctcctccagttccatgtggccaccatggtggacaatgagctgcctggcttgccccgtgccatgcagaagtctgggcgtcccctcaagtccctgaagcagcggttgaagggcaaggaaggccgggtgcgagggaacctgatgggcaaaagagtggacttctcggcccgtactgtcatcacccccgaccccaacctctccattgaccaggttggcgtgccccgctccattgctgccaacatgacctttgcggagattgtcacccccttcaacattgacagacttcaagaactagtgcgcagggggaacagccagtacccaggcgccaagtacatcatccgagacaatggtgatcgcattgacttgcgtttccaccccaagcccagtgaccttcacctgcagaccggctataaggtggaacggcacatgtgtgatggggacattgttatcttcaaccggcagccaactctgcacaaaatgtccatgatggggcatcgggtccgcattctcccatggtctacctttcgcttgaatcttagtgtgacaactccgtacaatgcagactttgacggggatgagatgaacttgcacctgccacagtctctggagacgcgagcagagatccaggagctggccatggttcctcgcatgattgtcaccccccagagcaatcggcctgtcatgggtattgtgcaggacacactcacagcagtgcgcaaattcaccaagagagacgtcttcctggagcggggtgaagtgatgaacctcctgatgttcctgtcgacgtgggatgggaaggtcccacagccggccatcctaaagccccggcccctgtggacaggcaagcaaatcttctccctcatcatacctggtcacatcaattgtatccgtacccacagcacccatcccgatgatgaagacagtggcccttacaagcacatctctcctggggacaccaaggtggtggtggagaatggggagctgatcatgggcatcctgtgtaagaagtctctgggcacgtcagctggctccctggtccacatctcctacctagagatgggtcatgacatcactcgcctcttctactccaacattcagactgtcattaacaactggctcctcatcgagggtcatactattggcattggggactccattgctgattctaagacttaccaggacattcagaacactattaagaaggccaagcaggacgtaatagaggtcatcgagaaggcacacaacaatgagctggagcccaccccagggaacactctgcggcagacgtttgagaatcaggtgaaccgcattcttaacgatgcccgagacaagactggctcctctgctcagaaatccctgtctgaatacaataacttcaagtctatggtcgtgtccggagctaaaggttccaagattaacatctcccaggtcattgctgtcgttggacagcagaacgtcgagggcaagcggattccatttggcttcaagcaccggactctgcctcacttcatcaaggatgactacgggcctgagagccgtggctttgtggagaactcctacctagccggcctcacacccactgagttctttttccacgccatggggggtcgtgaggggctcattgacacggctgtcaagactgctgagactggatacatccagcggcggctgatcaagtccatggagtcagtgatggtgaagtacgacgcgactgtgcggaactccatcaaccaggtggtgcagctgcgctacggcgaagacggcctggcaggcgagagcgttgagttccagaacctggctacgcttaagccttccaacaaggcttttgagaagaagttccgctttgattataccaatgagagggccctgcggcgcactctgcaggaggacctggtgaaggacgtgctgagcaacgcacacatccagaacgagttggagcgggaatttgagcggatgcgggaggatcgggaggtgctcagggtcatcttcccaactggagacagcaaggtcgtcctcccctgtaacctgctgcggatgatctggaatgctcagaaaatcttccacatcaacccacgccttccctccgacctgcaccccatcaaagtggtggagggagtcaaggaattgagcaagaagctggtgattgtgaatggggatgacccactaagtcgacaggcccaggaaaatgccacgctgctcttcaacatccacctgcggtccacgttgtgttcccgccgcatggcagaggagtttcggctcagtggggaggccttcgactggctgcttggggagattgagtccaagttcaaccaagccattgcgcatcccggggaaatggtgggggctctggctgcgcagtcccttggagaacctgccacccagatgaccttgaataccttccactatgctggtgtgtctgccaagaatgtgacgctgggtgtgccccgacttaaggagctcatcaacatttccaagaagccaaagactccttcgcttactgtcttcctgttgggccagtccgctcgagatgctgagagagccaaggatattctgtgccgtctggagcatacaacgttgaggaaggtgactgccaacacagccatctactatgaccccaacccccagagcacggtggtggcagaggatcaggaatgggtgaatgtctactatgaaatgcctgactttgatgtggcccgaatctccccctggctgttgcgggtggagctggatcggaagcacatgactgaccggaagctcaccatggagcagattgctgaaaagatcaatgctggttttggtgacgacttgaactgcatctttaatgatgacaatgcagagaagctggtgctccgtattcgcatcatgaacagcgatgagaacaagatgcaagaggaggaagaggtggtggacaagatggatgatgatgtcttcctgcgctgcatcgagtccaacatgctgacagatatgaccctgcagggcatcgagcagatcagcaaggtgtacatgcacttgccacagacagacaacaagaagaagatcatcatcacggaggatggggaattcaaggccctgcaggagtggatcctggagacggacggcgtgagcttgatgcgggtgctgagtgagaaggacgtggaccccgtacgcaccacgtccaatgacattgtggagatcttcacggtgctgggcattgaagccgtgcggaaggccctggagcgggagctgtaccacgtcatctcctttgatggctcctatgtcaattaccgacacttggctctcttgtgtgataccatgacctgtcgtggccacttgatggccatcacccgacacggagtcaaccgccaggacacaggaccactcatgaagtgttcctttgaggaaacggtggacgtgcttatggaagcagccgcacacggtgagagtgaccccatgaagggggtctctgagaatatcatgctgggccagctggctccggccggcactggctgctttgacctcctgcttgatgcagagaagtgcaagtatggcatggagatccccaccaatatccccggcctgggggctgctggacccaccggcatgttctttggttcagcacccagtcccatgggtggaatctctcctgccatgacaccttggaaccagggtgcaacccctgcctatggcgcctggtcccccagtgttgggagtggaatgaccccaggggcagccggcttctctcccagtgctgcgtcagatgccagcggcttcagcccaggttactcccctgcctggtctcccacaccgggctccccggggtccccaggtccctcaagcccctacatcccttcaccaggtggtgccatgtctcccagctactcgccaacgtcacctgcctacgagccccgctctcctgggggctacacaccccagagtccctcttattcccccacttcaccctcctactcccctacctctccatcctattctccaaccagtcccaactatagtcccacatcacccagctattcgccaacgtcacccagctactcaccgacctctcccagctactcacccacctctcccagctactcgcccacctctcccagctactcgcccacctctcccagctactcacccacttcccctagctactcgcccacttcccctagctactcgccaacgtctcccagctactcgccgacatctcccagctactcgccaacttcacccagctattctcccacttctcccagctactcacctacctctccaagctattcacccacctcccccagctactcacccacttccccaagttactcacccaccagcccgaactattctccaaccagtcccaattacaccccaacatcacccagctacagcccgacatcacccagctattcacctactagtcccaactacacacctaccagccctaactacagcccaacctctccaagctactctccaacatcacccagctattccccgacctcaccaagttactccccttccagcccacgatacacaccacagtctccaacctataccccaagctcacccagctacagccccagctcgcccagctacagcccaacctcacccaagtacaccccaaccagtccttcttacagtcccagctccccagagtataccccaacctctcccaagtactcacctaccagtcccaaatattcacccacctctcccaagtactcgcctaccagtcccacctattcacccaccaccccaaaatactccccaacatctcctacttattccccaacctctccagtctacaccccaacctctcccaagtactcacctactagccccacttactcgcccacttcccccaagtactcgcccaccagccccacctactcgcccacctcccccaaaggctcaacctactctcccacttcccctggttactcgcccaccagccccacctacagtctcacaagcccggctatcagcccggatgacagtgacgaggagaactga

SEQ ID NO: 1368 - DNA, 819 bp, homo sapiens
atgggaaacaccaccagcgaccgggtgtccggggagcgccacggcgccaaggctgcacgctccgagggcgcaggcggccatgccccggggaaggagcacaagatcatggtggggagtacggacgaccccagcgtgttcagcctccctgactccaagctccctggggacaaagagtttgtatcatggcagcaggatttggaggactccgtaaagcccacacagcaggcccggcccactgttatccgctggtctgaaggaggcaaggaggtcttcatctctgggtccttcaacaattggagcaccaagattccactgattaagagccataatgactttgttgccatcctggacctccctgagggagagcaccaatacaagttctttgtggatggacagtgggttcatgatccatcagagcctgtggttaccagtcagcttggcacaattaacaatttgatccatgtcaagaaatctgattttgaggtgttcgatgctttaaagttagattctatggaaagttctgagacatcttgtagagacctttccagctcacccccagggccttatggtcaagaaatgtatgcgtttcgatctgaggaaagattcaaatccccacccatccttcctcctcatctacttcaagttattcttaacaaagacactaatatttcttgtgacccagccttactccctgagcccaaccatgttatgctgaaccatctctatgcattgtccattaaggacagtgtgatggtccttagcgcaacccatcgctacaagaagaagtatgttactactctgctatacaagcccatttga

SEQ ID NO: 1369 - DNA, 2010 bp, homo sapiens
atgcaaaattctcacatggatgaatacagaaattctagtaatggcagcacaggcaacagttcagaggtagtggtagaacatcctactgatttcagtactgagattatgaacgttacagaaatggaacagtcacctgatgactctcccaatgtgaatgcatctacagaagaaactgaaatggcaagtgctgtggaccttccagtgacgctgacagaaacagaagcaaatttccctccagaatatgaaaaattttggaaaactgtagaaaataatcctcaggattttacaggctgggtatatttgcttcaatatgtagaacaggagaatcacttgatggctgccaggaaggcatttgacagatttttcatacactatccgtattgctatggttactggaaaaagtatgcagaccttgaaaagcggcacgacaacattaaaccatcagatgaggtttatcggcgggggcttcaggcaatacctcttagtgttgacctttggatacattatataaacttcttaaaagaaacattggaccctggtgatcctgagacaaacaatacaataagaggaacttttgagcatgctgttctagctgcaggaacagatttccgttctgacagactgtgggaaatgtatataaactgggaaaatgagcagggaaacctgagagaagttacagctatatatgatcgtattcttggtattccaacacagctgtatagtcatcattttcagagatttaaagaacatgtacagaataatttgcctagagatcttttaactggtgaacagtttattcagttgcgaagggaattagcttctgtaaatggtcatagtggtgatgatggtcctcctggtgatgatctaccatcgggaattgaagacataaccgatcctgcaaagctaattacagaaatagaaaacatgagacatagaatcattgagattcatcaagaaatgtttaattataatgagcatgaagttagtaaaaggtggacatttgaagaaggtattaaaagaccttactttcatgtgaaacctttggaaaaggcacaactaaaaaactggaaagaatacttagaatttgaaattgaaaatgggactcatgaacgagttgtggttctctttgaaagatgtgtcatatcatgtgccctctatgaggagttttggattaagtatgccaagtacatggaaaaccatagcattgaaggagtgaggcatgtcttcagcagagcttgtactatacatctcccaaagaaacccatggtgcatatgctttgggcagcttttgaggaacagcagggtaatattaatgaagccaggaatatcttgaaaacatttgaagaatgtgttctaggattggcaatggttcgtttacgaagagtaagtttagaacgacggcatggaaatctggaagaagctgaacatttgcttcaggatgccattaagaatgccaaatcaaataatgaatcttcattttatgctgtcaaactagcccggcatcttttcaaaatacagaaaaaccttccaaaatcaagaaaggtgcttttggaagcaatcgaaagagacaaagagaacacaaagttatacctcaatttacttgaaatggaatatagtggtgacctcaaacaaaatgaagaaaatatcctaaattgttttgacaaagctgtacatggttcattacctattaaaatgagaattacattttctcagagaaaagtggaatttcttgaagattttggttccgatgttaataagcttctgaatgcttatgatgaacatcaaacactcctgaaagaacaggattctttaaaaaggaaagcagaaaatggatcagaagaaccagaggaaaagaaagcacatacagaagatacaacttcatcatctacacagatgattgatggtgatttacaggcaaaccaagctgtatataattatagtgcgtggtatcaatacaattatcagaatccttggaattatggacaatattatcctccccctccaacctga

SEQ ID NO: 1370 - DNA, 1362 bp, homo sapiens; identical to SEQ ID NO: 459

SEQ ID NO: 1371 - DNA, 1515 bp, homo sapiens
atggcagcccaggctttggcgctgctgagagaggtagcgaggctggaagcgccgctggaggagctacgcgcgcttcactccgtgctgcaggcagtgccgctcaacgagcttcgccagcaagcggcggagctgcgcctcggcccgctcttctccctgcttaacgagaaccatagggaaaagactactttgtgtgtatccattctggagagattgctccaagctatggaaccggttcacgtggcccggaacctcagggttgacctgcagaggggactaattcaccctgatgattctgtaaaaatcctcactctttcccagattggaagaattgttgaaaattctgatgctgttactgagattctaaataatgctgaattactaaaacaaattgtttattgcattggtggagagaatctatctgtagcaaaagcggctatcaaatccctgtcaagaatatcactaacccaagctggactggaggctttatttgaaagcaatctgctggatgatttgaaaagtgtaatgaaaacaaatgacattgttcgatacagggtgtatgagctaattatagagatttcttccgtgtcaccagaatctttaaactactgtaccacaagtggattggtaacccagctcctgagagagctgactggtgaggatgtgttggtcagagccacctgtatagaaatggtgacatcactggcatatactcatcatgggcgacaatatcttgctcaagaaggagtaattgaccaaatttctaatataattgttggggcagattcagaccctttctctagcttctatctgccaggattcgtgaagttttttggaaacctggctgtcatggatagtcctcaacagatctgtgagcgttatcctatctttgtggaaaaagtctttgaaatgatagaaagtcaggaccccactatgattggtgtagctgtagacacagttggaatcttgggatccaatgttgaaggaaaacaggttttacagaaaacaggaactcgctttgaacgcttgcttatgagaataggacatcaatcaaagaatgccccagtggagctaaaaattagatgtttggatgcaatttcatctcttctgtacttaccacctgagcagcagactgatgaccttctgaggatgacagaatcctggttttcttctttatctcgggatccactggagctcttccgtggcattagtagtcagcccttccctgaactacactgtgctgccttaaaagtgtttacggccattgcaaaccaaccctgggctcagaaacttatgtttaacagtccaggttttgtagaatatgtggtggaccggtctgtggagcatgacaaagcttcaaaggatgccaaatatgaactagtgaaagcacttgccaattccaagacaattgcagaaatctttgggaacccaaattatttgaggctcagaacttacctgagtgaagggccatactatgtgaaacctgtttccacgacagcagtagaaggagccgaatga

SEQ ID NO: 1372 - DNA, 1800 bp, homo sapiens
atgagccggagtctcttgctctggttcttgctgttcctgctcctgctcccgccgctccccgtcctgctcgcggacccaggggcgcccacgccagtgaatccctgttgttactatccatgccagcaccagggcatctgtgtccgcttcggccttgaccgctaccagtgtgactgcacccgcacgggctattccggccccaactgcaccatccctggcctgtggacctggctccggaattcactgcggcccagcccctctttcacccacttcctgctcactcacgggcgctggttctgggagtttgtcaatgccaccttcatccgagagatgctcatgcgcctggtactcacagtgcgctccaaccttatccccagtccccccacctacaactcagcacatgactacatcagctgggagtctttctccaacgtgagctattacactcgtattctgccctctgtgcctaaagattgccccacacccatgggaaccaaagggaagaagcagttgccagatgcccagctcctggcccgccgcttcctgctcaggaggaagttcatacctgacccccaaggcaccaacctcatgtttgccttctttgcacaacacttcacccaccagttcttcaaaacttctggcaagatgggtcctggcttcaccaaggccttgggccatggggtagacctcggccacatttatggagacaatctggagcgtcagtatcaactgcggctctttaaggatgggaaactcaagtaccaggtgctggatggagaaatgtacccgccctcggtagaagaggcgcctgtgttgatgcactacccccgaggcatcccgccccagagccagatggctgtgggccaggaggtgtttgggctgcttcctgggctcatgctgtatgccacgctctggctacgtgagcacaaccgtgtgtgtgacctgctgaaggctgagcaccccacctggggcgatgagcagcttttccagacgacccgcctcatcctcataggggagaccatcaagattgtcatcgaggagtacgtgcagcagctgagtggctatttcctgcagctgaaatttgacccagagctgctgttcggtgtccagttccaataccgcaaccgcattgccatggagttcaaccatctctaccactggcaccccctcatgcctgactccttcaaggtgggctcccaggagtacagctacgagcagttcttgttcaacacctccatgttggtggactatggggttgaggccctggtggatgccttctctcgccagattgctggccggatcggtgggggcaggaacatggaccaccacatcctgcatgtggctgtggatgtcatcagggagtctcgggagatgcggctgcagcccttcaatgagtaccgcaagaggtttggcatgaaaccctacacctccttccaggagctcgtaggagagaaggagatggcagcagagttggaggaattgtatggagacattgatgcgttggagttctaccctggactgcttcttgaaaagtgccatccaaactctatctttggggagagtatgatagagattggggctcccttttccctcaagggtctcctagggaatcccatctgttctccggagtactggaagccgagcacatttggcggcgaggtgggctttaacattgtcaagacggccacactgaagaagctggtctgcctcaacaccaagacctgtccctacgtttccttccgtgtgccggatgccagtcaggatgatgggcctgctgtggagcgaccatccacagagctctga

SEQ ID NO: 1373 - DNA, 1506 bp, homo sapiens
atgaaccgcagccgccaggtgacgtgcgtggcctgggtccgctgcggcgtggccaaagagacaccagacaaggtagagctgagtaaagaagaagtaaaacgcctcattgctgaggcaaaggagaaattgcaagaagaaggtggtggcagtgatgaagaggagacaggcagtccttcagaagatggcatgcagagtgcacgcacccaggcacgcccaagagagcccctggaggatggtgacccagaggatgacaggacgcttgatgatgatgagctggctgagtacgacttagataaatatgatgaggaaggtgacccagatgctgagactcttggtgaatctctcttgggtcttacggtctacgggagtaatgatcaagatccttacgttactctgaaagatacagaacaatatgaacgtgaagatttcttgattaagcccagtgataatcttatagtttgtggccgagctgaacaggaccagtgcaatttagaggtgcatgtttataatcaagaagaagactctttttatgtacaccatgatatactcttgtctgcatatcctctgagtgtggaatggctgaattttgatcctagcccagatgattctactggaaattacattgctgtaggaaacatgacccctgttattgaagtgtgggaccttgatatagtggactctttagagccagtcttcacactcggaagtaaactttcaaaaaagaagaaaaagaaaggaaagaagagttcctcagcagaagggcataccgatgctgtccttgacctttcatggaataagctaatcagaaatgttttagcaagtgcatcagctgacaacactgtaattctgtgggatatgtccttggggaaaccagcagctagcctcgctgtacacacagacaaggtccaaacactgcagtttcatccatttgaagcacagactctgatttctggctcatatgataagtcagtggctttgtatgactgccgaagtccagatgaaagccatcgaatgtggcgattcagtgggcagatagagagagtgacttggaatcacttttcaccttgtcatttcttggccagtacagatgacggctttgtatataatttggatgcacgttcagataagccaatttttacacttaatgcacacaatgatgaaatctctggtcttgatcttagcagtcaaatcaagggctgtctcgtgactgcttcagctgacaaatacgtgaagatctgggacatcttaggagataggccaagtctagttcattctagggacatgaaaatgggagttctcttctgttcttcatgttgccctgatttgccatttatttatgcctttggaggtcaaaaagaagggcttcgggtctgggatataagcacagtctcttcagtaaatgaagcatttggaagacgagagaggcttgttcttgggagtgcaagaaattcatctattagtggcccttttggcagcaggagctcagatacacccatggagtcttaa

SEQ ID NO: 1374 - DNA, 1539 bp, homo sapiens
atgatgctgtccgagcaagcccaaaagtggtttccaacccacgtgcaggtcacagtgctccaagccaaagatctgaagccaaaaggcaaaagtggtaccaatgacacatacactataattcagctgggcaaggaaaagtactccacctctgtagctgagaaaacccttgagccagtttggaaggaggaggcctctttcgagctacctggattgctaattcagggaagtccagagaaatacattcttttccttatagttatgcacaggtccctggtgggtctggataaatttttagggcaggtggcaatcaatctcaatgacatctttgaggacaaacaaagaaggaaaacagagtggtttagattagaatccaaacaaggaaaacgaatcaaaaacaggggtgagataaaggtcaatattcagtttatgaggaacaatatgaccgcaagtatgtttgacttatcaatgaaggacaaaaccagatctccttttgcaaagttaaaagataagatgaagggtagaaaaaatgatggaacattttctgatacgtcttctgcaatcattccaagtactcacatgcccgatgccaatagtgaattttcaagtggtgaaatacagatgaaatccaaaccaaaaaagccttttctcttgggtcctcagcgactctcgtcagcgcattcaatgtctgatttatctgggtcccatatgtcttctgagaaactgaaggctggcaccataggtcaaacacatcttctcggacaccagttagattcctttggaacagttccagaaagtggaagtctcaaatctccacacagaagaacattaagctttgatacttctaaaatgaaccaacctgacagcattgtggatgaaggtgaattgtgtttcggaagacaaaatgacccatttacaaatgtgactgcttcattaccccaaaaatttgcaacactgccaaggaagaaaaatccatttgaagaaagcagcgaaacatgggacagcagcatgaatttattttcaaaaccaattgaaataagaaaagaaaataaaagagagaaaagggagaaagttagcctgtttgaaagagtgactggaaaaaaagatagcagaagatctgataaacttaacaatgggggatctgatagcccttgtgacttgaaatcacctaatgcatttagtgaaaatcgccaggactattttgattatgagtcaaccaatccatttacagcaaaattcagggcttcaaatataatgccatcttcaagttttcatatgagtccaacaagcaatgaagacctcaggaaaatcccggacagcaacccctttgatgccactgcagggtatcgtagtctgacctatgaagaggttctacaggagctggtgaaacacaaagaactccttaggaggaaagacacccacatccgggaactcgaggactacatcgacaacctccttgtaagggtaatggaagaaacgcccagtattctcagagtgccgtatgaaccatccaggaaagctggcaaattctctaacagttaa

SEQ ID NO: 1375 - DNA, 2448 bp, homo sapiens
atggaggtcagagcttcattacagaaggttagtggatcatctgattctgtggctacaatgaacagtgaagaatttgttttggttcctcagtatgcagatgataattctacaaaacatgaagaaaaacctcaactgaagatagtttctaatggtgatgaacaattggaaaaagccatggaagagattttgagagattccgagaaaaggccaagcagtcttcttgttgattgtcaaagttccagtgagatttcagaccattcgtttggagatattccagccagccaaacaaataagccatctcttcagttaattttggatccgtctaacacagaaatttctacacccagaccatcttctccaggtggactacctgaagaagatagtgttttatttaataaactgacctacttaggatgtatgaaggtttcttccccacgtaatgaagtagaggctttacgggcaatggcaaccatgaaatcttccagtcaatacccctttcctgttaccctgtatgtaccaaatgttccagaaggttctgtgagaattatagaccaatccagcaatgtggagatagcatcttttccaatctataaggtgttattctgtgcacgtggacatgacggaacaacagagagcaattgctttgcatttacagagagttcccatggttcggaagaatttcagatacatgttttctcctgtgaaattaaagaggcagtaagcagaattttgtacagtttctgtacagcattcaaacgttcttccagacaagtgtctgatgttaaagactcagttattcctacccccgacagtgatgtgtttaccttcagtgtctccttggaggtaaaagaagacgatggaaaaggaaactttagccctgtgcctaaggatagagataaattttatttcaaattaaagcaaggaatagagaagaaggttgtgattacagtgcagcaactttctaacaaagaattagctattgaaagatgttttggaatgttattaagcccaggtcgaaacgtgaagaacagtgacatgcatttactggatatggaatccatgggaaagagctatgatgggagagcttatgtcatcactggcatgtggaaccccaatgcaccagtatttctggcacttaacgaggaaaccccaaaagataagcaagtatacatgactgtggcagtggatatggtagtcacagaggtggtggagcctgttcgctttctcctggagacagtagtccgtgtgtaccctgcaaatgagcgattttggtatttcagcagaaagactttcacagagactttcttcatgagattgaaacagtctgagggaaaaggccataccaatgctggagatgcaatatatgaggtggtgagtctacagcgagagtctgacaaggaggaaccagtcactcctactagtggagggggtccaatgtcaccccaggatgatgaagcagaagaggagagtgataatgaactctcaagtggaacaggtgatgtgtctaaggattgtcctgagaagatcctgtattcttggggagagttgctaggaaaatggcacagtaaccttggtgcacgaccgaaagggctgtctactctggtgaagagtggtgtccctgaagcattgagggcagaggtatggcagttattggcaggctgccatgacaaccaggcaatgctggatagataccgaattcttatcacaaaggactcagcccaggagagtgttattactcgagatattcatcgtacatttcccgcacatgattactttaaagatactggaggagatggtcaagaatcgctctataagatctgcaaggcctactctgtgtatgatgaagacattgggtactgtcaagggcagtcttttcttgctgctgtattactgctgcatatgccagaggaacaagcattctgtgttttggtgaaaatcatgtacgactatggtttgagagacctctacagaaacaacttcgaagatcttcattgcaaattctaccagttggagagactaatgcaggaacagctaccggacctgcatagccatttttctgatctgaacctggaagctcatatgtatgcatcccagtggtttctcactctttttactgccaagttcccactctgcatggtgttccacatcattgacttactgctttgtgagggtttgaacataatctttcatgtagctttggctctcctaaagacctcaaaggaagaccttctgcaggctgattttgaaggtgctttaaagttctttagagttcagcttccaaagagatacagggcagaggaaaatgcaagaagactgatggagcaggcttgcaatattaaagtaccaaccaagaagctgaagaaatatgagaaagaatatcagacaatgcgagagagtcagctgcaacaggaagacccaatggatagatacaagtttgtatatttgtag

SEQ ID NO: 1376 - DNA, 3939 bp, homo sapiens
atgtcccggatcgaaaagatgagcattctgggcgtgcggagttttggaatagaggacaaagataagcaaattatcactttcttcagcccccttacaattttggttggacccaatggggcgggaaagacgaccatcattgaatgtctaaaatatatttgtactggagatttccctcctggaaccaaaggaaatacatttgtacacgatcccaaggttgctcaagaaacagatgtgagagcccagattcgtctgcaatttcgtgatgtcaatggagaacttatagctgtgcaaagatctatggtgtgtactcagaaaagcaaaaagacagaatttaaaactctggaaggagtcattactagaacaaagcatggtgaaaaggtcagtctgagctctaagtgtgcagaaattgaccgagaaatgatcagttctcttggggtttccaaggctgtgctaaataatgtcattttctgtcatcaagaagattctaattggcctttaagtgaaggaaaggctttgaagcaaaagtttgatgagattttttcagcaacaagatacattaaagccttagaaacacttcggcaggtacgtcagacacaaggtcagaaagtaaaagaatatcaaatggaactaaaatatctgaagcaatataaggaaaaagcttgtgagattcgtgatcagattacaagtaaggaagcccagttaacatcttcaaaggaaattgtcaaatcctatgagaatgaacttgatccattgaagaatcgtctaaaagaaattgaacataatctctctaaaataatgaaacttgacaatgaaattaaagccttggatagccgaaagaagcaaatggagaaagataatagtgaactggaagagaaaatggaaaaggtttttcaagggactgatgagcaactaaatgacttatatcacaatcaccagagaacagtaagggagaaagaaaggaaattggtagactgtcatcgtgaactggaaaaactaaataaagaatctaggcttctcaatcaggaaaaatcagaactgcttgttgaacagggtcgtctacagctgcaagcagatcgccatcaagaacatatccgagctagagattcattaattcagtctttggcaacacagctagaattggatggctttgagcgtggaccattcagtgaaagacagattaaaaattttcacaaacttgtgagagagagacaagaaggggaagcaaaaactgccaaccaactgatgaatgactttgcagaaaaagagactctgaaacaaaaacagatagatgagataagagataagaaaactggactgggaagaataattgagttaaaatcagaaatcctaagtaagaagcagaatgagctgaaaaatgtgaagtatgaattacagcagttggaaggatcttcagacaggattcttgaactggaccaggagctcataaaagctgaacgtgagttaagcaaggctgagaaaaacagcaatgtagaaaccttaaaaatggaagtaataagtctccaaaatgaaaaagcagacttagacaggaccctgcgtaaacttgaccaggagatggagcagttaaaccatcatacaacaacacgtacccaaatggagatgctgaccaaagacaaagctgacaaagatgaacaaatcagaaaaataaaatctaggcacagtgatgaattaacctcactgttgggatattttcccaacaaaaaacagcttgaagactggctacatagtaaatcaaaagaaattaatcagaccagggacagacttgccaaattgaacaaggaactagcttcatctgagcagaataaaaatcatataaataatgaactaaaaagaaaggaagagcagttgtccagttacgaagacaagctgtttgatgtttgtggtagccaggattttgaaagtgatttagacaggcttaaagaggaaattgaaaaatcatcaaaacagcgagccatgctggctggagccacagcagtttactcccagttcattactcagctaacagacgaaaaccagtcatgttgccccgtttgtcagagagtttttcagacagaggctgagttacaagaagtcatcagtgatttgcagtctaaactgcgacttgctccagataaactcaagtcaacagaatcagagctaaaaaaaaaggaaaagcggcgtgatgaaatgctgggacttgtgcccatgaggcaaagcataattgatttgaaggagaaggaaataccagaattaagaaacaaactgcagaatgtcaatagagacatacagcgcctaaagaacgacatagaagaacaagaaacactcttgggtacaataatgcctgaagaagaaagtgccaaagtatgcctgacagatgttacaattatggagaggttccagatggaacttaaagatgttgaaagaaaaattgcacaacaagcagctaagctacaaggaatagacttagatcgaactgtccaacaagtcaaccaggagaaacaagagaaacagcacaagttagacacagtttctagtaagattgaattgaatcgtaagcttatacaggaccagcaggaacagattcaacatctaaaaagtacaacaaatgagctaaaatctgagaaacttcagatatccactaatttgcaacgtcgtcagcaactggaggagcagactgtggaattatccactgaagttcagtctttgtacagagagataaaggatgctaaagagcaggtaagccctttggaaacaacattggaaaagttccagcaagaaaaagaagaattaatcaacaaaaaaaatacaagcaacaaaatagcacaggataaactgaatgatattaaagagaaggttaaaaatattcatggctatatgaaagacattgagaattatattcaagatgggaaagacgactataagaagcaaaaagaaactgaacttaataaagtaatagctcaactaagtgaatgcgagaaacacaaagaaaagataaatgaagatatgagactcatgagacaagatattgatacacagaagatacaagaaaggtggctacaagataaccttactttaagaaaaagaaatgaggaactaaaagaagttgaagaagaaagaaaacaacatttgaaggaaatgggtcaaatgcaggttttgcaaatgaaaagtgaacatcagaagttggaagagaacatagacaatataaaaagaaatcataatttggcattagggcgacagaaaggttatgaagaagaaattattcattttaagaaagaacttcgagaaccacaatttcgggatgctgaggaaaagtatagagaaatgatgattgttatgaggacaacagaacttgtgaacaaggatctggatatttattataagactcttgaccaagcaataatgaaatttcacagtatgaaaatggaagaaatcaataaaattatacgtgacctgtggcgaagtacctatcgtggacaagatattgaatacatagaaatacggtctgatgccgatgaaaatgtatcagcttctgataaaaggcggaattataactaccgagtggtgatgctgaagggagacacagccttggatatgcgaggacgatgcagtgctggacaaaaggtattagcctcactcatcattcgcctggccctggctgaaacgttctgcctcaactgtggcatcattgccttggatgagccaacaacaaatcttgaccgagaaaacattgaatctcttgcacatgctctggttgagataataaaaagtcgctcacagcagcgtaacttccagcttctggtaatcactcatgatgaagattttgtggagcttttaggacgttctgaatatgtggagaaattctacaggattaaaaagaacatcgatcagtgctcagagattgtgaaatgcagtgttagctccctgggattcaatgttcattaa

SEQ ID NO: 1377 - DNA, 2943 bp, homo sapiens
atggtttctaaaatgatcattgaaaacttcgaggcactcaagtcctggctcagcaagactctcgagcccatctgtgatgcagatccatccgccctagcaaaatatgttctggctttggtaaagaaagacaaaagtgaaaaagagttaaaggcattatgtattgatcagctggatgtatttcttcagaaagagacacagatatttgtggaaaaactttttgatgctgtgaatacaaagagttacctacctcctccagagcagccatcatcaggaagcctgaaggtagaattttttccacaccaagaaaaagatataaagaaggaagagatcactaaggaggaagagcgagagaagaagttttctagaaggctaaatcacagtcctccccagtcaagctcccgatacagggaaaatagaagccgtgatgagaggaaaaaagatgatcgttctcgcaaaagagattatgatcgaaaccctcctcgaagagattcatacagagaccggtacaatagaagacgagggcggagtcgcagttatagcaggagtcgaagtcgaagttggagtaaagagaggcttcgtgagagggacagagatagaagcaggactagaagcagaagcagaacacgaagcagggaaagggatctggtaaaacctaaatatgacctggatagaacagatccattagaaaataattatactccagtctcttcggtacctagtatttcatctggccactaccctgtacctactttgagcagcactattacagtaattgctcctactcatcatggaaacaacactaccgaaagttggtctgaatttcatgaagaccaagtggaccataactcttacgtaagaccacccatgccaaagaaacggtgtagagactatgatgaaaagggtttttgtatgagaggagacatgtgtccttttgatcatggaagtgatccagtagttgtagaagatgtgaatcttcctggtatgctgcctttcccagcacagcctcctgttgttgaaggaccacctcctcctggactccccccacctccaccaattcttacacccccacctgtgaatctcaggcccccagtaccaccgccaggtccattgccacccagtctcccacctgttacaggaccaccacctccacttcctcctttgcagccatctggcatggatgctcctccaaactctgcaaccagttctgttcctactgtagtaacaactggcattcatcaccagcctcctcctgctccaccctctctttttactgcagatacatatgacacagatggctacaatcctgaagccccaagcataacaaacacttccagacctatgtatagacacagagtgcatgcacaaaggcccaacttgataggactaacatcaggggatatggatttgccacccagagaaaagcctcccaataaaagcagtatgaggatagtagtggactcagaatcaaggaaaagaaccattggttctggagagcctggagttcctacaaagaagacttggtttgataaaccaaattttaatagaacaaacagcccaggctttcagaagaaggttcaatttggaaatgaaaataccaagcttgaacttagaaaagttcctccagaattaaataatatcagcaaacttaatgaacattttagtcgatttggaaccttggttaacttacaggttgcttataatggtgatcctgaaggtgccctaatccaatttgcaacatacgaagaagcaaagaaagcaatatcaagtacggaagcagtattaaacaatcgctttattaaggtttattggcacagagaaggaagcacccaacagttacaaactacttctccaaagcctttagtccagcagcccattttgcctgttgtgaagcagtcagtcaaagagcggctgggtccagtaccttcaagtactattgaacctgcagaagcccagagtgcctcttcagaccttcctcaggtgttgtctacatctactggcctaacaaaaacagtgtataatccagctgctttgaaggctgcacagaaaaccttacttgtttccacctctgcagttgataataatgaagcacagaaaaaaaaacaggaggcattgaaacttcagcaggatgtaaggaaaaggaaacaagaaattttagaaaagcacattgaaacacagaagatgttaatttcaaaactggagaaaaacaaaacaatgaagtctgaagataaagcagaaataatgaaaactttagaggttttgacaaaaaatattaccaagttgaaagatgaggtcaaagctgcttctcctggacgctgtcttccaaaaagtataaaaaccaagactcagatgcagaaggaattacttgacacagaactggatttatataagaagatgcaggctggagaagaagtcactgaacttaggagaaagtatacagaattacagctggaagctgccaaacgagggattctttcatctggtcggggcagaggaattcattcaagaggtcgaggtgcagttcatggccgaggcagggggcgagggcgagggcgaggtgtgcctggtcatgctgtggtggatcaccgtcccagggcattggagatttctgcatttacggagagcgatagagaagatcttcttcctcattttgcgcaatatggtgaaattgaagattgtcagattgatgattcctcacttcatgcagtaattacattcaagacaagagcagaagctgaagcagctgcagttcatggagctcgtttcaaagggcaagatctaaaactggcatggaataaaccagtaactaatatttcagctgttgaaacagaagaagttgagcctgatgaagaagaatttcaggaagagtctttggtggatgactcattacttcaagatgatgatgaagaagaagaggacaatgaatctcgttcttggagaagatga

SEQ ID NO: 1378 - DNA, 1656 bp, homo sapiens
atggaagaagaacttcctcttttctctggagacagtggcaagccagtacaggctactctgtcatctttgaagatgttagatgtgggaaagtggccaattttttccctttgttctgaagaagaactacagttaattcgtcaggcttgtgtctttggcagtgctggcaatgaagttttatacactacagtaaatgatgagatttttgtgcttggcacaaactgctgtggctgtttggggttaggtgacgtccagagcaccattgaacctcggagactggattctttaaatggcaaaaaaatagcctgcctcagctatgggagtggtccacatattgtccttgcaacaacagaaggagaagtctttacctggggtcataatgcttatagccagctgggcaatgggacaactaatcatggtttagtgccctgtcatatctctactaatctgtcaaacaaacaagtcattgaagttgcctgtgggtcttaccattctttggtgctaacatctgatggagaggtatttgcctggggttataataactctgggcaggtaggatctggatcaacagttaatcagccaatccctcgaagagtcactggctgcctacaaaataaagtagttgtgaccatagcatgtgggcagatgtgctgcatggcagtagtagacacgggggaggtctatgtctggggttacaacggaaacgggcagcttggactcggcaacagtggcaaccagccaaccccttgcagagtggcagctttgcaaggcatccgtgtccagagggtcgcctgtggctacgcacacacattagtattaacagatgaaggccaagtgtatgcttggggcgccaattcttatgggcagttgggcactggcaataaaagcaaccagtcctatcctactcctgtcactgtggaaaaggacaggattatcgagattgcagcctgtcactccacacacacgtctgcggccaagacgcagggtgggcacgtgtacatgtggggccagtgccggggtcagtccgtgatcctcccgcacctcacccacttctcctgcactgacgacgtgtttgcctgctttgccacgcccgccgtcacgtggcgcctcctctccgtggaacctgatgaccacctcacagtggctgagtcactgaagagggaatttgacaacccggacactgcagacctgaagtttctagttgatggaaagtacatttatgcacataaagtccttctcaagattcgatgtgagcattttcgttcgtcattggaagataacgaggatgatattgtagaaatgagtgaattttcatatcctgtttaccgggccttcctggaatacctatacacagacagcatcagcctttctcctgaggaggcagtaggactgctagacttggctacattttatagagaaaatcgtttgaaaaagctctgccaacaaactatcaagcaaggcatctgcgaggagaatgccatcgctctgctctcggctgcggtgaagtatgatgcacaggatttagaagaattctgcttcaggttttgcataaaccatctgactgtagtaacacaaacatcaggttttgcagaaatggaccatgatctcctgaagaactttatcagcaaagcaagcagagttggagcctttaaaaattga

SEQ ID NO: 1379 - DNA, 1752 bp, homo sapiens
atgccgaaaccaatcaacgtaagagtaactacaatggatgctgagctggaatttgccattcagcccaatacaactggcaaacaactttttgaccaggtggtgaaaacagttggtttgcgtgaggtctggttttttgggctgcagtatgtagacagcaaaggttattctacatggcttaaactaaataaaaaggtaacacagcaggatgttaaaaaagagaatcctttacagttcaagtttagagctaaattctttcctgaagatgtttctgaggaattaattcaagaaataacccagagactcttcttcttgcaagttaaagaagccatcttaaatgatgagatatattgcccgccagaaactgcagttcttttggcttcctatgctgtccaagccaagtatggagattacaataaagagattcataagccaggctacctggctaatgatagactcctaccccagcgtgtattggaacaacacaaactaacaaaagaacagtgggaagaaagaatacagaactggcatgaagaacatagaggaatgttaagggaggattctatgatggaatacctgaagattgcacaagatctagaaatgtatggagtcaactattttgaaataaaaaataaaaaaggaactgaattgtggctaggtgttgatgctttgggtctgaatatttatgagcatgacgacaagttaacacctaaaattggttttccctggagtgaaatcagaaatatttcatttaatgacaaaaaatttgttataaagccaatcgacaaaaaggcacctgattttgtgttttatgcacctcgtctgagaatcaataagcggattttggccttatgtatgggaaaccatgaactatacatgcgaagaaggaagcctgatactattgaagtacaacagatgaaggctcaggctagggaggagaaacatcagaagcagttggaaagggcacaattagagaatgaaaagaagaaaagagaaatagcagaaaaggaaaaggaaagaatagaacgtgaaaaggaagagctaatggaacgtctaaaacaaattgaagagcagacaattaaagctcagaaagaactagaagaacagactcgaaaagctctagaactggatcaagaacgaaaacgagcaaaagaagaagcagaacgacttgaaaaggagcgtcgagctgctgaagaggcaaagtctgccatagcaaaacaagctgccgaccagatgaagaatcaggagcagctagcagcagaacttgctgaattcactgccaagattgcacttctagaggaagccaagaagaaaaaggaagaggaagctactgagtggcaacacaaagcttttgcagcccaggaagacttggaaaagaccaaagaagagttaaaaactgtgatgtctgccccccctccacctccaccaccaccagtcattcctccaacagaaaacgaacatgatgaacacgatgagaataatgctgaagctagtgctgaattatcaaatgaaggggtaatgaaccatagaagcgaggaagaacgtgtaaccgaaacacagaaaaatgagcgtgttaagaagcaacttcaggcattaagttcagaattagcccaagccagagatgaaaccaagaaaacacaaaatgatgttcttcatgctgagaatgttaaagcaggccgtgataagtacaagactctgcgacagattcgacaaggcaatacaaagcagcgtatcgatgagtttgaagcaatgtga

SEQ ID NO: 1380 - DNA, 2388 bp, homo sapiens
atggaaggcttaacgctgagcgatgcggagcagaaatactattcagatctcttctcctactgcgacattgagagcaccaagaaggtggtggtcaacgggcgggtgctggagctgttccgggccgcgcagctgccgaacgacgtggtcctacagatcatggagctttgtggtgcaacaagacttggttattttggaagaagtcagttctacattgctttgaaacttgtagctgttgcccagtctggtttccctttaagagtggaaagtataaatacagtaaaggaccttcctctgccaagatttgttgcttcaaagaatgaacaggaatctcgccatgcagcctcatattcttcagattctgaaaatcaagggtcgtattctggtgtaattcccccaccacctggcagggggcaagtgaaaaagggatccgtaagccatgatacggttcagcctcgtacatctgcagatgcacaggaacctgcatccccagtagtttcaccacagcaatccccaccaacttctccacacacatggaggaagcacagccgtcatcccagcggtgggaatagtgagaggcctctcgcgggacctgggccattttggtctccctttggtgaagcacaatcaggttcttctgctggtgatgcagtgtggtcagggcattccccacctccacctcaagaaaactgggtcagttttgcagatactccaccaaccagtactcttttaaccatgcatcctgcttctgtccaggaccagacaacagtacgaactgtagcatcagctacaactgccattgaaattcgtaggcaatccagtagttatgatgatccctggaaaataacagatgaacaaagacagtattatgtaaatcagtttaaaaccattcagcctgatctaaacggatttattccaggatctgcagctaaagagttttttacaaaatcaaaacttcctattcttgaactttctcatatttgggaactctcagactttgataaagatggtgcattgacactggatgagttttgtgctgcttttcatctggtggttgctaggaagaatggctatgatttaccagaaaaacttcctgaaagcttaatgcccaaactgattgatttggaagattcagcagatgttggggatcagccaggtgaggtaggttattcaggctctcctgctgaagctcctccaagcaagtcaccatcgatgccatcactaaaccagacatggcctgagctgaatcagagcagtgagcagtgggagacatttagtgaacgctcttcaagctcacaaactctgacccaatttgattctaacattgcaccagctgatcctgatactgctattgttcatccagttcccattcgtatgactccaagcaaaatccacatgcaggaaatggaacttaaaagaactggcagcgatcatacaaatcccactagcccattacttgtgaaaccatctgaccttttagaagaaaataagataaattcatcggtgaaattcgcttctggtaatactgtagatggttacagtagttcagactcttttacttctgacccagaacagatcgggagcaatgtaactcgtcaaaggtctcattcaggaacgtcgcctgataacactgcaccaccacctccccctccaaggccacagccctctcattctagatcatcatctttagatatgaatcggacctttacagtcaccacaggacaacaacaggctggagttgttgcccatcctcctgcagtgcctccaagaccacagccctcacaggctcctggtcctgctgtgcatcgcccagtggatgccgatggcctcataactcacactagtacctcacctcagcagataccagagcaaccaaattttgcagatttcagtcagtttgaagtatttgctgcatcaaatgtaaacgacgaacaagatgatgaagccgagaaacatccagaagtcctgccggctgaaaaagcttctgatcctgcaagttctcttcgagttgccaaaacagatagtaaaactgaagaaaagacagctgctagtgctcctgccaatgtgagcaaaggcacaacaccacttgctccaccacctaaacctgttcgaagaagattaaaatcagaagatgaattaaggccagaagttgatgaacatacacaaaagacgggtgtcttagctgctgttcttgcatcacaaccttctattcccagatctgttgggaaagataagaaagctattcaggcatcaattagacgtaataaggaaaccaacaccgttttggccagattgaatagcgaattgcagcaacaattaaaggatgttcttgaggagagaatttccctggaagttcaactggaacaacttcgaccattctctcacctataa

SEQ ID NO: 1381 - DNA, 3444 bp, homo sapiens; identical to SEQ ID NO: 75

SEQ ID NO: 1382 - DNA, 636 bp, homo sapiens
atgcaaagtgctatgttcttggctgttcaacacgactgcagacccatggacaagagcgcaggcagtggccacaagagcgaggagaagcgagaaaagatgaaacggacccttttaaaagattggaagacccgtttgagctacttcttacaaaattcctctactcctgggaagcccaaaaccggcaaaaaaagcaaacagcaagctttcatcaagccttctcctgaggaagcacagctgtggtcagaagcatttgacgagctgctagccagcaaatatggtcttgctgcattcagggcttttttaaagtcggaattctgtgaagaaaatattgaattctggctggcctgtgaagacttcaaaaaaaccaaatcaccccaaaagctgtcctcaaaagcaaggaaaatatatactgacttcatagaaaaggaagctccaaaagagataaacatagattttcaaaccaaaactctgattgcccagaatatacaagaagctacaagtggctgctttacaactgcccagaaaagggtatacagcttgatggagaacaactcttatcctcgtttcttggagtcagaattctaccaggacttgtgtaaaaagccacaaatcaccacagagcctcatgctacatga

SEQ ID NO: 1383 - DNA, 1659 bp, homo sapiens
atggggaaagtgaatgtggccaagttgcgttacatgagccgagatgacttcagggtcttgaccgcggttgaaatgggcatgaagaaccatgaaattgttcccggcagtttgattgcttctatagccagccttaaacatggtggctgtaataaagttttaagagaattagtgaaacataaactcatagcttgggagcgtaccaaaactgtccagggctatcggttgacaaatgcaggatatgattacctagctttgaaaacactttcttctaggcaagtagttgagtctgttggaaaccagatgggtgttggcaaagaatcagatatttacattgttgcaaatgaagaaggacaacaatttgcattaaagcttcacagactaggaagaacctcgtttcgaaatttgaaaaacaaacgcgattatcataaacataggcacaatgtgtcatggctatatttatctcgtctctctgccatgaaggaatttgcctatatgaaggcattgtatgagaggaaatttccagttccaaagccaattgattacaatcgtcatgcagtggtcatggaactcataaatggttatccactatgtcagatacaccatgttgaagatcctgcatcagtatatgatgaagctatggaactaattgtcaaacttgcaaatcatgggctgattcatggagattttaatgaatttaatctcattttggatgaaagtgaccatatcaccatgattgattttccacagatggtttcaacttctcatcccaatgctgagtggtattttgacagagatgttaaatgcattaaagatttctttatgaaacgtttcagctacgaaagtgagctttttccaacttttaaggatatcaggagagaagacactcttgatgtggaggtttctgccagtggctacacaaaggaaatgcaggcagatgatgaactgcttcatccattaggtccagatgataaaaatattgaaacaaaagagggatctgaattctcattttcagatggagaagtggcagaaaaagcagaggtttacgggtcagaaaatgaaagtgaacggaactgtctagaagaatcagagggctgctattgcagatcatctggagaccctgaacaaataaaggaagacagtttatcagaagagagtgctgatgcacggagttttgaaatgactgaattcaatcaagctttagaagaaataaaagggcaggttgttgaaaacaactctgtaactgaattttctgaggagaaaaacagaactgaaaattacaacaggcaagatggtcagagagttcaaggaggagtccctgctggctctgacgagtatgaagatgaatgccctcatctaattgccttgtcgtcattaaatagagaattcaggcctttcagagatgaagaaaatgtgggagctatgaatcagtatagaacaagaactctgagtatcacttcttcaggcagtgctgtaagctgttcaacaattcctccagaactggtgaaacagaaggtgaaacgtcagttgacaaaacagcaaaaatcagctgtcagacgtcgattgcagaaaggagaagcaaatatatttaccaagcaacgtagggaaaacatgcaaaatatcaaatcaagtttggaagcagccagcttttggggagaataa

SEQ ID NO: 1384 - DNA, 1350 bp, homo sapiens
atgccagccacactcctcagagccgtggccagatctcatcatatattatcaaaagcacatcagtgccgaagaatcggtcatctaatgttaaaaccacttaaggaatttgaaaatacaacatgcagcacactgacaatacgtcaaagcttggatttgttccttcctgataaaacagctagtggtttgaataagtctcagatcctggaaatgaaccaaaaaaagtcagataccagcatgctgtctccattaaatgctgctcgttgccaagatgaaaaggcacaccttccaaccatgaaatcctttggtactcacaggagagtgacccacaaaccaaatctgttgggttctaaatggtttataaaaatattaaagaggcatttctcatctgtatcaacggaaacatttgttccaaaacaagacttcccacaggtgaagagaccactaaaagcatccaggaccagacagccatccaggaccaaccttccagttctgtctgtgaacgaggacctaatgcactgcacagcatttgcaacggcagatgagtatcatctgggaaatctgtctcaagatctggcctcccacggatatgttgaagtaacaagcttgcctagagatgcagcaaatattttggtgatgggtgtggaaaattctgcaaaagaaggtgatcctggaacaatattcttcttcagggaaggagctgctgtgttttggaatgtgaaagacaaaactatgaagcatgtgatgaaagttctagaaaaacatgaaattcagccctatgaaatcgcactggtacactgggaaaatgaagaacttaactacataaaaatagagggacagtcaaaacttcacaggggggaaatcaagttaaattcagagctggatttagatgatgccattctagagaagtttgctttctccaatgctctatgcctttctgtaaaactggcaatttgggaagcatcactggataaatttattgaatctattcagtcaattcctgaggctttaaaagctgggaagaaagtgaaactatctcatgaagaagttatgcagaaaatcggtgaactctttgctctaaggcaccgtataaacttgagttcagacttcctgattactcctgatttctactgggacagagaaaacctggaaggactttacgataaaacgtgtcaattccttagcattggccgaagagttaaggtcatgaatgaaaaacttcagcactgcatggaactaacagatctaatgcggaatcacctgaatgagaagagggcactccgcttggagtggatgattgtcatcctcattaccatagaggtaatgtttgagctgggacgagtatttttctga

SEQ ID NO: 1385 - DNA, 777 bp, homo sapiens
atggccaaatatcaaggtgaagttcaaagtttgaaactggatgatgattcagttatagaaggagtaagcgaccaagtacttgtggcagttgtggtcagtttcgctttgattgctaccctggtatatgcacttttcagaaatgtacatcaaaacattcacccagaaaaccaggagctagtaagggtacttcgagaacagcttcaaacagaacaggatgcacctgctgccactcgacagcagttctacactgacatgtactgtcccatctgcctgcaccaagcctccttcccggtggagaccaactgtggacatcttttttgtggtgcctgcattattgcttactggcgatatggttcatggcttggggcaatcagttgtccaatctgtagacaaacggtaaccttactcctaacagtatttggtgaagatgatcagtctcaggatgttctgagattgcatcaggatattaatgattataaccggagattctcagggcaacccagatctattatggagagaattatggatctacccactttactgaggcatgcattcagggaaatgttttcagtcgggggccttttctggatgtttcgcatcaggataatactttgtttaatgggagcttttttctatcttatatcacctctagattttgtacctgaagccttgtttggaattctaggctttctagatgatttctttgtcatctttttattgcttatctacatctctattatgtatcgagaagtgataacccaaaggctaactagatga

SEQ ID NO: 1386 - DNA, 1431 bp, homo sapiens
atggcaaattctgcaaaagcagaagaatatgaaaagatgtctcttgaacaggcaaaagcgtcagtgaattctgaaacagagtcttcattcaatattaatgaaaacacaacagcttctgggactgggctttctgaaaagacttctgtctgtaggcaagtagacatagcaagaaagagaaaagagtttgaagatgatcttgtaaaggaaagttctagttgtgggaaagacactccatccaagaagagaaaacttgatcctgaaattgtcccagaggaaaaagattgtggtgatgctgaaggcaattcaaagaaaagaaaaagagaaactgaggatgttccaaaagataaatcttctactggagatggcactcaaaataagagaaaaatagcacttgaggatgttcctgaaaagcagaaaaatctggaagaaggacacagctcaacagtggctgcccattacaatgaacttcaggaagttggtttggagaagcgtagtcaaagtcgtattttttacctaagaaactttaataattggatgaaaagtgttctcattggagaatttttggaaaaggtacgacagaagaaaaaacgtgatatcactgttttggacctgggatgtggtaaaggtggagatttgctgaaatggaaaaaaggaagaattaacaagctagtttgtactgatattgccgatgtttctgtcaaacagtgtcagcagcggtatgaggacatgaaaaatcgtcgtgatagtgaatatattttcagtgcagaatttataactgctgacagctcaaaggaacttctgattgacaaatttcgtgacccacaaatgtgttttgacatctgcagttgtcagtttgtctgtcattactcatttgagtcttatgagcaggctgacatgatgctgagaaatgcgtgtgagagacttagccctgggggctattttattggtactactcccaatagctttgaattgataagacgccttgaagcttcagaaacagaatcatttggaaatgaaatatatactgtgaaatttcagaagaaaggagattatcctttatttggctgcaaatatgacttcaacttggaaggtgttgtggatgttcctgaattcttggtctattttccattgctaaatgaaatggcaaagaagtacaatatgaaactagtctacaaaaaaacatttctggaattctacgaagaaaagattaagaacaatgaaaataaaatgctcttaaaacgaatgcaggccttggagccatatcctgcaaatgagagttctaaacttgtctctgagaaggtggatgactatgaacatgcagcaaagtacatgaagaacagtcaagtaaggttacctttgggaaccttaagtaaatcagaatgggaagctacaagtatttacttggtgtttgcctttgagaaacagcagtga

SEQ ID NO: 1387 - DNA, 1200 bp, homo sapiens
atgtccctgcagtacggggcggaggagacgcccctcgccggcagttacggcgcggccgattcgtttccaaaggacttcggctacggcgtggaggaggaggaagaggaggcggcggcggcgggcggaggggttggggcaggggcaggcggtggctgtggtccggggggcgctgacagctccaagccgaggattctgctcatgggactccggcgcagcggcaagtcctccatccagaaggtggtgtttcataagatgtcacccaacgagaccctctttttggaaagtaccaacaagatttataaggatgacatttccaatagctcctttgtgaatttccagatatgggattttcctgggcaaatggacttttttgacccaacctttgactatgagatgatcttcaggggaacaggagcattgatatacgtcattgacgcacaggatgactacatggaggctttaacaagacttcacattactgtttctaaagcctacaaagttaacccagacatgaattttgaggtttttattcacaaagttgatggtctgtctgatgatcacaaaatagaaacacagagggacattcatcaaagggccaatgatgaccttgcagatgctgggctagaaaaactccatcttagcttttatctgactagtatctatgaccattcaatatttgaagcctttagtaaggtggtgcagaaactcattccacaactgccgaccttggaaaacctattaaatatctttatatcaaattcaggtattgaaaaagcttttctctttgatgttgtcagcaaaatctacattgcaacagacagttcccctgtggatatgcaatcttatgaactttgctgtgacatgatcgatgttgtaattgatgtgtcttgtatatatgggttaaaggaagatggaagtggaagtgcttatgacaaagaatctatggcaattatcaagctgaataatacaactgtcctttatttaaaggaggtgactaaatttttggcactggtctgcattctaagggaagaaagctttgaaagaaaaggtttaatagactacaacttccactgtttccgaaaagctattcatgaggtttttgaggtgggtgtgacttctcacaggagctgtggtcaccagactagtgcctccagtctgaaagcgctgacacacaatggcacgccacgaaacgccatctag

SEQ ID NO: 1388 - DNA, 1227 bp, homo sapiens
atgatgtgctcacgggtgccctctgaacagtcttctggtacctctctcttgcctaaagacggtgccccattttcttgggattccttggatgaggatggattggatgactccttgctggagctgtcagagggagaagaagatgatggtgatgtaaattacacagaggaagagattgatgcactgttgaaggaagatgacccatcatatgagcagtcttctggggaagatgatggtgggcatgttgagaagggagaaagagggagtcaaattctacttgatactccccgagagaaaaattcatcgtacagcctgggaccagtagctgagactcctgacctcttcaaactacctcagctaagtacatcaagtggtcatggaccagctcatactaaaccattaaacagacgctctgtactagaaaagaatcttataaaagtaactgttgcaccatttaatccaacagtttgtgatgctctgcttgataaggacgagactgattcgtccaaagatactgaaaaactctcttcccttggagaagagatgagagaagatggtcttagcccaaatgaaagcaaactttgtactgaatctgaagggatcagccccaataactctgcctggaatgggccccagctctcttcttcaaacaataactttcaacagactgtctctgataaaaatatgcctgacagtgagaaccctacgtctgtattctctcggatctcagaccattcagagactcctaatatggagttatcctgcagaaatggtggttcacacaagtcaagttgtgaaatgagatctctggttgtttccacctcatcaaacaaacaggatgttcttaacaaggattctgggaagatgaaaggccatgagagaagactaggcaaagtcattcctgttctacaaactaagaccaggactaatgttccgacgttttcacagtcaaatctagaacagcagaagcagctttatctcaggagtgtcattgctcatatagaagacccagaggacactaaccaaggtatctcgggggagctttgtgccttgatggatcaagttcatcatatgcagcactcaaaatggcagcatccttcggacctcaccacgcgaaactacgcccgccgacagaaacatctgcaaagatacagtctgactcagtgggttgacaggaacatgcgaagccaccatcggttccagcgtctcccagacttctcgtacagttaa

SEQ ID NO: 1389 - DNA, 2499 bp, homo sapiens
atgttcgctctgggcttgcccttcttggtgctcttggtggcctcggtcgagagccatctgggggttctggggcccaagaacgtctcgcagaaagacgccgagtttgagcgcacctacgtggacgaggtcaacagcgagctggtcaacatctacaccttcaaccatactgtgacccgcaacaggacagagggcgtgcgtgtgtctgtgaacgtcctgaacaagcagaagggggcgccgttgctgtttgtggtccgccagaaggaggctgtggtgtccttccaggtgcccctaatcctgcgagggatgtttcagcgcaagtacctctaccaaaaagtggaacgaaccctgtgtcagccccccaccaagaatgagtcggagattcagttcttctacgtggatgtgtccaccctgtcaccagtcaacaccacataccagctccgggtcagccgcatggacgattttgtgctcaggactggggagcagttcagcttcaataccacagcagcacagccccagtacttcaagtatgagttccctgaaggcgtggactcggtaattgtcaaggtgacctccaacaaggccttcccctgctcagtcatctccattcaggatgtgctgtgtcctgtctatgacctggacaacaacgtagccttcatcggcatgtaccagacgatgaccaagaaggcggccatcaccgtacagcgcaaagacttccccagcaacagcttttatgtggtggtggtggtgaagaccgaagaccaagcctgcgggggctccctgcctttctaccccttcgcagaagatgaaccggtcgatcaagggcaccgccagaaaaccctgtcagtgctggtgtctcaagcagtcacgtctgaggcatacgtcagtgggatgctcttttgcctgggtatatttctctccttttacctgctgaccgtcctcctggcctgctgggagaactggaggcagaagaagaagaccctgctggtggccattgaccgagcctgcccagaaagcggtcaccctcgagtcctggctgattcttttcctggcagttccccttatgagggttacaactatggctcctttgagaatgtttctggatctaccgatggtctggttgacagcgctggcactggggacctctcttacggttaccagggccgctcctttgaacctgtaggtactcggccccgagtggactccatgagctctgtggaggaggatgactacgacacattgaccgacatcgattccgacaagaatgtcattcgcaccaagcaatacctctatgtggctgacctggcacggaaggacaagcgtgttctgcggaaaaagtaccagatctacttctggaacattgccaccattgctgtcttctatgcccttcctgtggtgcagctggtgatcacctaccagacggtggtgaatgtcacagggaatcaggacatctgctactacaacttcctctgcgcccacccactgggcaatctcagcgccttcaacaacatcctcagcaacctggggtacatcctgctggggctgcttttcctgctcatcatcctgcaacgggagatcaaccacaaccgggccctgctgcgcaatgacctctgtgccctggaatgtgggatccccaaacactttgggcttttctacgccatgggcacagccctgatgatggaggggctgctcagtgcttgctatcatgtgtgccccaactataccaatttccagtttgacacatcgttcatgtacatgatcgccggactctgcatgctgaagctctaccagaagcggcacccggacatcaacgccagcgcctacagtgcctacgcctgcctggccattgtcatcttcttctctgtgctgggcgtggtctttggcaaagggaacacggcgttctggatcgtcttctccatcattcacatcatcgccaccctgctcctcagcacgcagctctattacatgggccggtggaaactggactcggggatcttccgccgcatcctccacgtgctctacacagactgcatccggcagtgcagcgggccgctctacgtggaccgcatggtgctgctggtcatgggcaacgtcatcaactggtcgctggctgcctatgggcttatcatgcgccccaatgatttcgcttcctacttgttggccattggcatctgcaacctgctcctttacttcgccttctacatcatcatgaagctccggagtggggagaggatcaagctcatccccctgctctgcatcgtttgcacctccgtggtctggggcttcgcgctcttcttcttcttccagggactcagcacctggcagaaaacccctgcagagtcgagggagcacaaccgggactgcatcctcctcgacttctttgacgaccacgacatctggcacttcctctcctccatcgccatgttcgggtccttcctggtgttgctgacactggatgacgacctggatactgtgcagcgggacaagatctatgtcttctag

SEQ ID NO: 1390 - DNA, 978 bp, homo sapiens
atgttcgccaacctaaaatacgtttccctgggaattttggtctttcagactaccagtttggttctaacaatgcgttattccagaactttaaaagaagaaggacctcgttatctatcttctacagcagtggttgttgctgaacttttgaagataatggcctgcattttattggtctacaaagacagcaaatgtagtctaagagcactgaatcgagtactacatgatgaaattcttaataaacctatggaaacacttaaacttgctattccatcagggatctatactcttcagaataatttactgtatgtggcactatcaaatctagatgcagctacttatcaggtcacgtatcagttaaaaattcttacaacagcattattttctgtgtctatgcttagtaaaaaattgggtgtataccagtggctgtccctagtaattttgatgacaggagttgcttttgtacagtggccctcagattctcagcttgattctaaggaactttcagctggttctcaatttgtaggactcatggcagttctcacagcatgtttttcaagtggctttgctggggtttactttgagaaaatcttaaaagaaacaaaacaatcagtgtggataagaaatattcagcttggtttctttggaagtatatttggattaatgggtgtatacatttatgatggagaactggtatcaaagaatggattttttcagggatataaccgactgacctggatagtagttgttcttcaggcacttggaggccttgtaatagctgctgttattaagtatgcagataatattttaaaaggatttgcaacctctttatcgataatattatcaacattgatctcctatttttggcttcaagattttgtgccaaccagtgtctttttccttggagccatccttgtaataacagctacttttttgtatggttatgatcccaaacctgcaggaaatcccactaaagcatag

SEQ ID NO: 1391 - DNA, 1068 bp, homo sapiens
atggcggaagttcatagacgtcagcatgctcgggttaaaggagaagcccccgcgaaatcctccacactccgagatgaggaggagctggggatggcgtcggccgaaacgctgaccgtgtttctgaagctgctggccgccggcttttacggcgtgagctccttcctgatcgtggtggtgaataagagcgtgctcaccaattacagatttccctcctcactatgtgttggacttggccagatggtggccacagtggcagttctctgggtgggaaaggcgctcagagtagtcaagtttcctgaccttgacagaaatgtacctcgaaagacgtttccactacctctactatattttgggaaccaaatcacgggactgttcagcacaaagaaactgaacttgccaatgtttacagttctgagaaggttctccatcctgtttacaatgtttgctgaaggagttttactcaagaagactttttcttggggtattaaaatgactgtatttgcaatgattattggagcctttgtagctgccagctctgacttggcatttgatctggaaggatatgcttttattctgataaacgatgtcctaacagcagcaaatggtgcatacgtaaaacaaaaattagattcaaaagagctgggaaaatatggactgctctattacaatgcactgttcatgattctgcccaccctggccattgcgtatttcacaggagatgcacaaaaggctgtggagtttgaaggctgggctgacaccctctttcttctgcagttcaccctctcctgtgtgatggggtttatcttaatgtacgccacagtactctgcacgcagtataattctgctcttacaactacaatagttggctgtattaagaatatattaataacttatattggaatggtctttggtggagattatattttcacgtggacaaacttcattggtttaaatatcagcattgctgggagcctggtatattcctatatcactttcactgaagagcagctgagcaaacagtcagaggctaataacaagctggacattaaggggaaaggagcagtgtga

SEQ ID NO: 1392 - DNA, 2133 bp, homo sapiens; identical to SEQ ID NO: 514

SEQ ID NO: 1393 - DNA, 3654 bp, homo sapiens
atgtacataaagcaggtgattatccagggttttcgaagttacagagatcaaacaattgtagatcccttcagttcaaaacataatgtgattgtgggcagaaatggatctggaaaaagtaactttttttatgcaattcagtttgttctcagtgatgagtttagtcatcttcgtccagaacagcggttggctttattgcatgaaggtactggtcctcgtgttatttctgcttttgtggagattatttttgataattcagacaaccggttaccaatcgataaagaggaagtttcacttcgaagagttattggtgccaaaaaggatcagtatttcttagacaagaagatggtcacgaaaaatgatgtgatgaacctccttgaaagcgctggtttttctcgaagcaatccttattatattgttaaacaaggaaagatcaaccagatggcaacagcaccagattctcagagattaaagctattaagagaagtagctggtactagagtgtatgacgaacgaaaggaagaaagcatctccttaatgaaagaaacagagggcaaacgggaaaaaatcaatgagttgttaaaatacattgaagagagattacatactctagaggaagaaaaggaagaactagctcagtatcagaagtgggataaaatgagacgagccctggaatataccatttacaatcaggaacttaacgagactcgtgccaaacttgatgagctttctgctaagcgagagactagtggagaaaaatccagacaattaagagatgctcagcaggatgcaagagataaaatggaggatatcgaacgccaagttagagaattgaaaacaaaaatttcagctatgaaagaagaaaaagaacagcttagtgctgaaagacaagagcagattaagcagaggactaagttggagcttaaagccaaggatttacaagatgaactagcaggcaatagtgaacaaaggaaacgtttattaaaagagaggcagaagctgcttgaaaaaatagaagaaaagcagaaagaactggcagaaacagaacccaaattcaacagtgtgaaagagaaagaagaacgaggaattgctagattggctcaagctacccaggaaagaacggatctttatgcaaagcagggtcgaggaagccagtttacatcaaaagaagaaagggataagtggattaaaaaggaactcaagtctttagatcaggctattaatgacaagaaaagacagattgctgctatacataaggatttggaagacactgaagcaaataaagagaaaaatctggagcagtataataaactggaccaggatcttaatgaagtcaaagctcgagtagaagaactggacagaaaatattacgaagtaaaaaataagaaagatgaactacaaagtgaaagaaactacttgtggagagaagagaatgcagaacagcaagcacttgctgctaaaagagaagatcttgaaaagaagcaacaacttcttagagcagcaacaggaaaggccattttaaatggaatagacagcataaacaaagtgctagaccacttccgtcgaaaaggaataaaccagcatgttcaaaatggctatcatggtattgtaatgaataactttgaatgtgaaccagctttctacacatgcgtggaagtcactgctggaaacaggttattttatcacattgttgattcagatgaagtcagcacgaagattttaatggagtttaataaaatgaatcttcctggagaggttacttttctgcctcttaacaagttagatgtcagggatacagcctatcctgaaaccaatgatgctattcctatgatcagcaaactgaggtacaatcccagatttgacaaagctttcaaacatgtgtttggaaagactcttatttgtcgtagcatggaagtttcaacccagctggcccgtgctttcactatggactgtattactttggaaggtgaccaagtcagccatcggggtgctctaactgggggttattatgacacaaggaagtctcgacttgaattgcaaaaagatgttagaaaagcagaagaagaactaggtgaacttgaagcaaagctcaatgaaaacctgcgcagaaatattgaaaggattaataatgaaattgatcagttgatgaaccaaatgcaacagatcgagacccagcaaaggaaatttaaagcatctagagatagcatattatcagaaatgaagatgctaaaagagaagaggcagcagtcagagaaaaccttcatgcctaagcaacgtagcttacagagtttggaggcaagcttgcatgctatggagtctaccagagagtcattgaaagcagaactgggaactgatttgctttctcaactgagtttggaagatcagaagagagtagatgcactgaatgatgagattcgtcaacttcagcaggaaaacagacagttgctaaatgaaagaattaaattagaaggtattattactcgagtagagacttatctcaatgagaatctgagaaaacgcttggaccaagtagaacaggaacttaatgagctgagagagacagaagggggtactgttctcacagccacaacatcagaacttgaagccatcaataaaagagtaaaagacactatggcacgatcagaagatttggacaattccattgataaaacagaagctggaattaaggagcttcagaagagtatggagcgctggaaaaatatggaaaaagaacatatggatgctataaatcatgatactaaagaactggaaaagatgacaaatcggcaaggcatgctattgaagaagaaagaagagtgtatgaagaaaattcgagaacttggatcacttccccaggaagcatttgaaaagtaccagacactgagcctcaaacagttgtttcgaaaacttgagcagtgcaacacagaattaaagaagtacagccatgttaacaaaaaggctttggatcagtttgtaaatttctccgagcagaaagaaaagttaataaagcgtcaagaagagttagataggggttacaaatcaatcatggaactgatgaatgtacttgaacttcggaaatatgaagctattcagttaactttcaaacaggtatctaagaacttcagtgaagtattccagaagttagtacctggtggcaaagctactttggtgatgaagaaaggagatgtggagggcagtcagtctcaagatgaaggagaagggagtggtgagagtgagaggggttctggctcacaaagcagtgtcccatcagttgaccagtttactggagttggaattagggtgtcatttacaggaaaacaaggtgaaatgagagaaatgcaacagctttcaggtggacagaaatccttggtagcccttgctctgatttttgccattcagaaatgtgacccggctccattttacttgtttgatgaaattgaccaggctctggatgctcagcacagaaaggctgtgtcagatatgattatggaacttgctgtacatgctcagtttattacaactacttttaggcctgaactgcttgagtcagctgacaaattctatggtgtaaagttcagaaataaggttagtcatattgatgtgatcacagcagagatggccaaagactttgtagaagatgataccacacatggttaa

SEQ ID NO: 1394 - DNA, 3276 bp, homo sapiens
atggccaaaagaaaggaagaaaatttttcctctcctaaaaatgccaaaaggccaagacaagaagaattggaggattttgataaagatggtgacgaagacgaatgtaaaggtactactttgactgcagcagaagttggaataattgagagtattcacctaaaaaacttcatgtgtcattcaatgcttggaccttttaagtttggttctaatgtcaactttgttgttggcaacaatggaagtgggaagagtgcagtactcacagctctcatagtcggtcttggtggaagagcagttgctactaatagaggatcctctttaaaaggttttgtgaaagatggacagaactctgcagatatctcaataacattgaggaacagaggagatgatgcctttaaagccagtgtgtatggtaactctatacttatacagcaacacatcagcatagatggaagtcgatcttataaacttaaaagtgcaacaggctccgtggtttccacgaggaaagaagagctgattgcaattcttgatcattttaacatccaggtggataatccagtttctgttttaacacaagaaatgagcaagcagttcttacagtctaaaaatgaaggagacaaatacaaattcttcatgaaagcaacgcaacttgaacagatgaaggaagattattcatacattatggaaacgaaagaaagaacaaaggagcagatacatcaaggagaagagcggcttactgaactaaagcgccagtgtgtagagaaagaggaacgttttcaaagtattgctggtttaagtacaatgaagactaatttagagtccttgaaacatgaaatggcttgggcagtggtcaatgaaattgaaaaacaattgaatgccatcagagataatatcaaaattggagaagatcgtgctgctagacttgacaggaaaatggaagaacagcaggtcagacttaatgaggcagaacaaaagtacaaggatattcaagacaaactagaaaagattagtgaagagacaaatgcacgagcaccagaatgtatggcattgaaagcagatgttgttgctaagaaaagggcctataatgaagctgaggttttatataaccgatccttaaacgaatataaagcattaaagaaagatgatgagcagctttgtaaacgaattgaagagctgaaaaaaagtactgaccaatctttggaacctgaacggttggaaagacaaaaaaaaatatcttggttaaaagagagagtaaaggcctttcaaaatcaagaaaattcagtcaatcaagagatcgaacagtttcagcaagccatagaaaaggacaaagaagaacatggcaaaattaagagagaagaattagatgtgaagcatgcactgagctacaatcagaggcaactgaaagaattgaaagatagtaaaactgatcgactcaaaagatttggccctaatgttccagctcttcttgaagccatagatgatgcttatagacaaggacattttacctataaacctgtaggccctttaggagcttgcattcatcttcgggacccagaacttgctttggctattgaatcttgcttaaaagggcttctgcaggcctattgttgccataatcatgctgatgaaagggtccttcaggcactcatgaaaaggttttatttaccagggacctcacggccaccgataatagtttctgagtttcggaatgagatatatgatgtaagacacagagctgcttatcatccagactttccaacagttctgacagctttagaaatagataatgcggttgtggcaaatagcctaattgacatgagaggcatagagacagtgctactaatcaaaaataattctgtagctcgtgcagtaatgcagtcccaaaagccacccaaaaattgtagagaagcttttactgctgatggtgatcaagtttttgcaggacgttattattcatctgaaaatacaagacctaagttcctaagcagagatgtggattctgaaataagtgacttggagaatgaggttgaaaataagacggcccagatattaaatcttcagcaacatttatctgcccttgaaaaagatattaaacacaatgaggaacttcttaaaaggtgccaactacattataaagaactaaagatgaaaataagaaaaaatatttctgaaattcgggaacttgagaacatagaagaacaccagtctgtagatattgcaactttggaagatgaagctcaggaaaataaaagcaaaatgaaaatggttgaggaacatatggagcaacaaaaagaaaatatggagcatcttaaaagtctgaaaatagaagcagaaaataagtatgatgcaattaaattcaaaattaatcaactatcggagctagcagacccacttaaggatgaattaaaccttgctgattctgaagtggataaccaaaaacgagggaaacgacattatgaagaaaaacaaaaagaacacttggataccttaaataaaaagaaacgagaactggatatgaaagagaaagaactagaggagaaaatgtcacaagcaagacaaatctgcccagagcgtatagaagtagaaaaatctgcatcaattctggacaaagaaattaatcgattaaggcagaagatacaggcagaacatgctagtcatggagatcgagaggaaataatgaggcagtaccaagaagcaagagagacctatcttgatctggatagtaaagtgaggactttaaaaaagtttattaaattactgggagaaatcatggagcacagattcaagacatatcaacaatttagaaggtgtttgactttacgatgcaaattatactttgacaacttactatctcagcgggcctattgtggaaaaatgaattttgaccacaagaatgaaactctaagtatatcagttcagcctggagaaggaaataaagctgctttcaatgacatgagagccttgtctggaggtgaacgttctttctccacagtgtgttttattctttccctgtggtccatcgcagaatctcctttcagatgcctggatgaatttgatgtctacatggatatggttaataggagaattgccatggacttgatactgaagatggcagattcccagcgttttagacagtttatcttgctcacacctcaaagcatgagttcacttccatccagtaaactgataagaattctccgaatgtctgatcctgaaagaggacaaactacattgcctttcagacctgtgactcaagaagaagatgatgaccaaaggtga

SEQ ID NO: 1395 - DNA, 1119 bp, homo sapiens
atgtcgaggaggagatttgattgccgaagtatttcaggcctactaactacaactcctcaaattccaataaaaatggaaaactttaataatttctatatacttacatctaaagagctagggagaggaaaatttgctgtggttagacaatgtatatcaaaatctactggccaagaatatgctgcaaaatttctaaaaaagagaagaagaggacaggattgtcgagcagaaattttacacgagattgctgtgcttgaattggcaaagtcttgtccccgtgttattaatcttcatgaggtctatgaaaatacaagtgaaatcattttgatattggaatatgctgcaggtggagaaattttcagcctgtgtttacctgagttggctgaaatggtttctgaaaatgatgttatcagactcattaaacaaatacttgaaggagtttattatctacatcagaataacattgtacaccttgatttaaagccacagaatatattactgagcagcatataccctctcggggacattaaaatagtagattttggaatgtctcgaaaaatagggcatgcgtgtgaacttcgggaaatcatgggaacaccagaatatttagctccagaaatcctgaactatgatcccattaccacagcaacagatatgtggaatattggtataatagcatatatgttgttaactcacacatcaccatttgtgggagaagataatcaagaaacatacctcaatatttctcaagttaatgtagattattcggaagaaactttttcatcagtttcacagctggccacagactttattcagagccttttagtaaaaaatccagagaaaagaccaacagcagagatatgcctttctcattcttggctacagcagtgggactttgaaaacttgtttcaccctgaagaaacttccagttcctctcaaactcaggatcattctgtaaggtcctctgaagacaagacttctaaatcctcctgtaatggaacctgtggtgatagagaagacaaagagaatatcccagaggatagcagcatggtttccaaaagatttcgtttcgatgactcattacccaatccccatgaacttgtttcagatttgctctgttag

SEQ ID NO: 1396 - DNA, 1245 bp, homo sapiens
atgaatctgcaaagatactggggagagataccaatatcatcaagccagaccaacagaagttccttcgatttgctcccacgggagttccgtctggtggaagtccatgacccacccctgcaccaaccctcagccaacaagccgaagccccccactatgctggacatcccctcagagccatgtagtctcaccatccatacgattcagttgattcagcacaaccgacgtcttcgcaaccttattgccacagctcaggcccagaatcagcagcagacagaaggtgtaaaaactgaagagagtgaacctcttccctcgtgccctgggtcacctcctctccctgatgacctcctgcctttagattgtaagaatcccaatgcaccattccagatccggcacagtgacccagagagtgacttttatcgtgggaaaggggaacctgtgactgaactcagctggcactcctgtcggcagctcctctaccaggcagtggccacaatcctggcccacgcgggctttgactgtgctaatgagagtgtcctggagaccctaactgatgtggcacatgagtattgccttaagtttaccaagttgctgcgttttgctgtggaccgggaggcccggctgggacagactccttttcctgatgtgatggagcaggtattccatgaagtgggtattggcagtgtgctctccctccagaagttctggcagcaccgcatcaaggactatcacagttacatgctacagattagtaagcaactctctgaagaatatgaaaggattgtcaatcctgagaaggccacagaggacgctaaacctgtgaagatcaaggaggaacctgtgagcgacatcacttttcctgtcagtgaggagctggaggctgaccttgcttctggagaccagtcactgcctatgggagtgcttggggctcagagcgaacgcttcccatctaacctggaggttgaagcttcaccacaggcttcaagtgcagaggtaaatgcttctcctctttggaatctggcccatgtgaaaatggagcctcaagaaagtgaagaaggcaatgtctctgggcatggtgtgctgggcagtgatgtcttcgaggagcctatgtcaggcatgagtgaagctgggattcctcagagccctgatgactcagatagcagctatggttcccactccactgacagcctcatggggtcctcccctgttttcaaccagcgctgcaagaagaggatgaggaaaatataa

SEQ ID NO: 1397 - DNA, 20658 bp, homo sapiens
atggcatctagtcctgagcttcccaccgaagatgaacagggttcctggggcatcgacgatctccatatttcattgcaagctgaacaggaagacacccagaagaaagccttcacgtgctggataaactcacagttggccaggcacacttctccctcagttatatccgacctattcacagacattaaaaaggggcatgtcctcctggatctgctagaagtactttctgggcaacagttgcctcgggataaaggatctaataccttccagtgtagaatcaatatagaacatgccttgacattcctaagaaaccgatcaattaagctaataaatattcatgttactgatatcattgatggaaacccatccattatccttggcctaatttggacaattatcctgcactttcatattgagaagcttgcccagactctttcttgcaattacaatcagccttccctggatgatgtgagtgtggttgactcatctcctgcctcaagtcctccagctaagaaatgctctaaagtgcaagcaagatggcaaatgtctgcaagaaaggcccttcttttgtgggctcaggaacaatgcgccacctatgagtctgtcaatgtgaccgattttaagtcaagttggagaaatgggatggcttttttggccatcattcatgccttgcgaccagacctaattgacatgaagagtgtgaagcatagatccaacaaagacaatctgagagaggccttcagaattgcagaacaagaattaaaaatccccagattgctggaaccagaagatgtggatgttgttgatcctgatgaaaagtccatcatgacctatgtggcacagtttctgcagtattccaaagatgcccctgggactggagaggaggctcagggaaaggtgaaagatgctatgggctggttaactctgcaaaaggaaaaactacagaagttgctaaaggattcagagaatgatacctactttaaaaagtataatagcctgctgtcctttatggagtcattcaatgaagaaaaaaagtcctttttggatgtcctgtcaataaaacgggatctggatgagctggacaaggatcatttacagttgagagaagcctgggatggcctcgatcaccagattaatgcatggaaaataaagctaaattatgccttgcccccacccctccatcaaactgaagcttggctccaggaggtagaagagcttatggatgaagatttgtcagcctcccaggatcactctcaagccgtgactctgatacaagagaaaatgactttattcaagagcctgatggatagatttgagcatcattcgaacattctccttacctttgaaaataaggatgaaaatcacttgccattggtaccacctaacaaattggaggaaatgaaaagacgaatcaacaacattttggagaaaaaatttattctacttctagaatttcattactacaagtgcttagttcttggtttggtagatgaagtgaaatcaaaattggatatttggaacattaaatatgggagcagagaatctgtggaattattgctggaagactggcataaatttattgaagaaaaagaattcctagctcgacttgatacttcttttcaaaaatgtggagaaatttataagaatttggctggagaatgtcagaatattaataaacagtatatgatggtgaaatctgatgtttgtatgtatagaaaaaatatatataatgtgaagtccactctacaaaaagtgctggcatgttgggctacttatgtggaaaaccttcgcttactaagggcttgctttgaggagacaaagaaggaagaaattaaagaggtaccctttgagacactagcccagtggaatctagaacacgctactttaaatgaagcaggaaatttcttagtcgaagtcagcaatgatgtggttggatcatctatttctaaagaactgagaaggctgaataaaagatggagaaagttggtttcaaaaactcaacttgaaatgaacctgccactgatgataaaaaaacaggatcagcccacttttgacaattctggaaatattctatctaaagaagagaaagcaactgttgagttttcaacagatatgtcagtagaacttcctgaaaattataatcaaaatataaaggctggagagaaacatgaaaaagaaaatgaagaattcacagggcaactaaaagtggctaaagatgttgaaaaactcattggacaagtggaaatctgggaggcagaagccaaatctgttttggatcaagatgatgtggacacctcaatggaagaatctttgaagcatcttattgccaaaggctctatgtttgatgagcttatggcaagaagtgaagatatgttacaaatggatatacaaaatatttcaagccaggagtcctttcaacatgttctcacaactgggcttcaggcaaagattcaagaagctaaagagaaagtccagatcaatgtggtaaaactcattgcagcgttgaagaacttaactgacgtttcaccagatttggacatcaggctgaagatggaagaatcccagaaggaacttgaatcatatatgatgagggctcagcagttactggggcaaagagagagccccggtgaactcatttcaaaacacaaggaagcactaataatttctaatacaaaaagtctggccaagtatttgaaagctgttgaagaactaaaaaataatgtaactgaggacataaagatgtctttagaagaaaagagtagagatgtctgtgccaaatgggagtctcttcatcatgaactgtctttatatgttcaacaactaaaaatagatattgaaaaaggaaagcttagtgacaatattttaaaacttgaaaagcaaataaataaagaaaagaaacttatccgtagaggaaggaccaagggtctcatcaaagaacatgaggcctgcttttctgaggaaggctgcctgtaccagcttaatcaccacatggaagtcctgagggagctgtgtgaagagctgccttcacagaagagtcaacaagaagtgaagagactactcaaagattatgaacaaaagatagaaagacttctgaaatgtgcttccgagattcatatgacactgcagcccacagcgggaggcacgtcgaaaaacgaggggaccatcaccacatctgagaatagaggaggggatccccacagtgaggcaccatttgcaaaatcagataatcagccatcaactgaaaaggcaatggaacccactatgaagtttagcctggcatcagtgttaaggcctctgcaagaagaaagcattatggaaaaggattacagtgcatctataaatagtttactagagaggtatgatacatacagagatattcttgaacaccacctgcaaaacaacaaattcaggattacttctgatttctctagtgaagaggacaggagtagttcttgtctgcaggctaaactgacagatctacaggtcataaaaaatgaaactgatgctcgctggaaagagtttgaaattatttcattgaagttagaaaatcatgtgaatgacataaaaaagccttttgtaattaaggaaagagacacactaaaggaaagagaaagagagcttcagatgactcttaataccagaatggaatctttagagacagcactgcggcttgtgttacctgtagagaaggcatcacttcttctctgtggctcggacctgcctctccataaaatggccatccagggatttcatctcattgatgctgatcgcatctatcaacacctaaggaatatccaagattccatagcaaaacagattgaaatatgtaaccgcttagaagagccaggcaactttgtattaaaggagttacacccatttgatctacacgcaatgcagaatattatactgaaatacaaaacacaatttgaaggaatgaaccacagggtgcagaggagtgaagatactctcaaagctctggaagactttttggcgtctctcagaacagctaaactctctgctgagcccgttacagacctttcagcctcagatacacaggtggcacaagaaaatacgttgacagtaaaaaataaagagggagaaattcatctgatgaaagacaaggccaaacatttggataaatgtttgaagatgctcgatatgagctttaaagatgctgaacggggtgatgacacctcctgtgaaaacctgcttgatgctttttcaataaagttatctgagacacatggctatggggtacaggaggaattcactgaggaaaacaaattactagaggcttgtattttcaaaaataatgaactccttaaaaatattcaagatgtgcagagtcaaatcagtaaaattggtcttaaggatcctactgttccagctgtgaaacatcggaaaaaatcattaatcagactggataaggttctagatgaatatgaagaagagaagagacatttacaagaaatggctaattctcttccacacttcaaagatggcagagaaaaaaccgtgaatcaacagtgccaaaatacagtagtcttgtgggagaataccaaagccttggtcaccgaatgtcttgaacaatgtgggagagttttggagctcttaaaacaatatcagaattttaaaagcatcttgacaactttgattcaaaaagaagagagtgtcatctccctgcaggcttcgtacatgggaaaggagaacctgaagaaaaggatagcagagattgaaattgtcaaagaagaatttaatgagcatttagaagttgtagacaagataaaccaggtctgcaaaaatctacaattttatctaaataaaatgaaaacttttgaagagcccccttttgaaaaagaggctaatattattgtggatagatggcttgatataaatgagaagacagaagattactatgaaaatcttggtcgagctctagctttgtgggacaaactttttaacttaaaaaatgtcattgatgagtggacagaaaaggcccttcaaaaaatggaattacatcaattgactgaagaggacagagaaaggctgaaggaagaattacaagtccatgaacaaaaaacttcagaattttctagaagagtggctgaaatacagtttttgctccaaagcagtgaaatacctcttgaattgcaggtcatggagtcctctattttgaacaagatggaacatgtacagaagtgcttaacaggagaatccaactgccatgcactcagtggcagcactgctgagctaagggaggatctcgaccaagccaagacccagatcgggatgactgaatccctcttaaaagccctgtctccttctgacagcttggagatcttcactaaactagaggagatacaacagcagattctacagcaaaaacacagtatgatattacttgagaatcaaataggttgtctgactcctgaactctctgaattgaaaaagcaatatgaaagtgtcagtgatttatttaataccaaaaaaagtgttttgcaagatcacttttctaagttattgaatgatcaatgcaagaactttaatgactggttcagcaacattaaagtgaaccttaaggagtgttttgaatcatcagaaacaaaaaagagtgtggaacaaaagctacaaaaactttctgatttcttgactcttgaaggaagaaacagtaaaataaagcaggtggacagcgtactgaagcatgtgaagaagcatctgcccaaagcacatgtgaaggagcttatcagttggctcgtgggtcaggaattcgaattagaaaaaatggagtccatatgccaggctcgagcaaaggagcttgaagactccttgcagcagctactgagactccaggatgaccatagaaacctgaggaagtggttgactaatcaagaagagaaatggaaaggaatggaagaaccaggggagaaaactgagctgttctgccaagctttagctagaaagagggaacagtttgaatctgtggcccaattgaacaactctttgaaggaatatgggtttactgaagaagaagaaataataatggaagcaacatgtttgatggatagataccagacattactgagacaactaagtgaaatcgaggaagaggataagttactacccacagaggaccagagctttaatgatcttgcacatgatgtaattcattggataaaagagattaaagagtcccttatggttttgaattcatccgaaggcaaaatgccacttgaggaaagaatccaaaaaatcaaggaaatcattttgctgaagcctgaaggggatgccagaatagagaccatcatgaagcaggctgagagcagcgaggccccgctggttcagaagaccctcactgacatcagcaaccagtgggacaacacactccatttagctagcacctacctaagccatcaagaaaagcttctactagaaggagagaaatatttacaaagtaaggaggatctgagattaatgctcatagaactaaagaagaaacaggaagcaggctttgctctacaacatggtctgcaggagaagaaagctcagttaaagatttataagaaattcctcaagaaagcccaagatttgacatccttgctaaaggagttaaaatctcagggaaactacctcttggagtgcactaaaaatcccagcttcagtgaagagccttggctggaaataaagcatctacacgaaagtcttcttcaacaactgcaggattctgtgcaaaacttggacggtcacgttcgagaacatgattcataccaggtttgcgtcacagacctgaatactacattggacaatttctccaaggaatttgtcagtttttctgataagcctgtggatcaaatagcggttgaggaaaaattgcagaaactgcaggaactagagaatagactcagtttacaagatggcacattaaagaagattttagctttagcaaaatccgtcaagcaaaatacatcttcagtggggcagaagattattaaagatgatataaaatcacttcagtgtaaacaaaaagatttggaaaacaggcttgcatctgctaagcaggagatggaatgttgtctcaacagcattctcaaatcaaaacgctcaacagaaaagaaaggaaagtttactctgccaggcagagagaagcaggccacttctgatgtgcaggagtctactcaggaatcagctgcagtggaaaagttggaggaagactgggaaataaacaaggattcagctgtggaaatggctatgtcaaaacaactttctcttaatgctcaagaaagcatgaaaaacactgaagatgagcggaaagtcaatgagctgcaaaatcaacctttagaattagatactatgttaagaaatgaacaattagaagagatagagaaattatatacccagttggaagcaaagaaagcagccattaagccactggaacaaacagaatgtcttaacaaaacagaaactggggccttggttctccacaatataggatattcggcacagcatttggacaatttgcttcaggcacttattactttgaagaaaaacaaagaaagccaatattgtgtcctcagagattttcaggaataccttgctgcagttgaatcttcaatgaaagccttgttgacagacaaggaaagtcttaaagtaggaccactggacagtgtaacgtatctggacaaaattaaaaaattcatagcatccatagaaaaagagaaagattctttaggcaacttgaaaatcaaatgggagaatttatcaaaccacgtgactgacatggataagaaattgttggaaagccagattaagcaacttgaacatggttgggaacaagtggaacagcagattcaaaagaagtattctcagcaggtagtggaatatgatgaatttacaaccctcatgaataaggtacaggacactgagatttctctgcaacagcagcagcaacatctacagttaaggctgaagtctccagaagaacgggcagggaaccaaagcatgattgccttgaccactgacctccaggctaccaagcatggattttctgttttaaaggggcaagctgaacttcagatgaagaggatttggggagaaaaagaaaagaagaatttggaggatggaataaataacttgaagaaacaatgggaaacattggagccattacacttagaagcagaaaatcagattaagaagtgtgacataaggaacaagatgaaagagactatcttatgggccaagaatttgttgggtgaacttaatccctccattccccttctcccagatgacattctttcacagatcagaaagtgcaaagtgacacatgatggcattctagctaggcagcagtctgtggaatcgttggctgaagaggtcaaagataaggttcctagccttacaacctatgagggcagtgatttaaataataccctagaggacttacggaatcaataccaaatgctggttttaaaatcaactcaaagatcacagcaattagaatttaagttggaagaaagaagcaatttttttgctataataaggaagtttcaacttatggttcaagaaagtgaaacactgataattcccagggtggagacagctgccacggaagctgaactaaaacatcaccatgttactttggaggcatctcagaaggaattgcaagaaattgacagtggaatctcaacacatcttcaggagctaacaaacatctatgaggagctgaatgtgtttgaaagattatttctggaagatcagttgaaaaatcttaagattaggaccaacagaatacaaagattcattcagaatacatgtaatgaagtggaacacaagataaagttttgcagacaattccatgaaaaaacatcagcgcttcaggaggaggctgacagtatacagcgcaatgaactattacttaatcaagaagtaaataaaggtgttaaagaggagatctataatcttaaagacagactcaccgctattaagtgttgcatcttacaggtattgaaacttaaaaaagtgtttgactatattggactaaactgggatttttcacaacttgaccaattacaaacccaagtatttgaaaaagaaaaggaacttgaagaaaaaattaagcagttggacacatttgaggaagaacatggcaaatatcaggcattattaagtaaaatgagagctattgatttgcaaattaagaaaatgactgaagtagtactaaaagctcctgatagctctccggaaagcagacggctcaatgcccaaattttaagtcagagaattgagaaagccaagtgtttatgtgatgagataataaagaaattaaatgaaaataagacctttgatgactcattcaaggagaaagaaatactacaaataaagctgaatgcagaagaaaatgataagttatacaaagttctccaaaacatggtattagaactctcaccaaaagaattggatgaaaagaattgtcaggacaaactagaaacttccttacatgttttaaatcagataaaatctcaattacagcagccattacttataaatttggaaattaaacatattcaaaatgaaaaggacaattgtgaagcatttcaggagcaagtttgggcagaaatgtgtagtattaaagctgtgactgctattgagaaacaaagagaagaaaactcttctgaagcgagtgatgtggagacaaaactacgtgagtttgaagatcttcagatgcagcttaacacaagcattgatttgcgcacaaatgtcttgaatgatgcttatgaaaatctaacacgctataaagaagcagtcaccagggcagtggagagcatcacttccctcgaagccatcattataccctacagagtagatgttggtaatccagaagaatctttagagatgcctcttcgaaaacaagaggaattggaatccacagtagcacacatccaggacctcactgagaaactgggaatgatatccagccccgaagccaaactacaacttcagtatactttacaggaactagtttctaagaactcagcaatgaaggaagctttcaaagcacaggaaactgaggcagaaaggtatcttgagaattacaaatgctatagaaaaatggaagaggatatttacactaacctcagcaaaatggagacagttcttggacagtccatgtcctcgttgccactgtcttacagagaagctttagagcgcttggaacagagcaaggccttggtgtcaaatcttatatcaaccaaagaagagttaatgaaactacgacagatccttagactcttgagactcaggtgcacagaaaatgatggcatatgtttgctcaagattgtgtcggctctgtgggagaaatggctgagtttgctggaagctgctaaagagtgggagatgtggtgcgaagaactgaagcaggaatggaaatttgtcagtgaagaaattgaacgagaggcaattattttagataatcttcaggaagaactccctgaaatttccaaaacaaaagaggcagccaccacagaggaactctctgagctgctagactgtttatgccaatatggagagaacgtggagaagcaacagctgttactgactctacttcttcagcgcatcagaagtatccagaatgttcctgaaagctcaggggctgtggaaactgttccagcatttcaagaaattacttctatgaaagaacgatgcaacaagcttcttcagaaagttcagaaaaataaagaattggtgcagactgaaatccaagaaagacattccttcacaaaagagataattgctttgaagaatttctttcaacagaccacaacttcattccaaaatatggcattccaggatcacccagaaaagtcagaacaatttgaggagcttcaaagcatccttaagaaagggaaactaacttttgagaatattatggaaaaactgcgaatcaagtattccgaaatgtacaccatagtccctgcagagattgaatcccaggtggaagaatgcagaaaagctttagaagacatagatgagaagattagcaatgaagtcttaaaaagctcaccatcatatgcaatgaggagaaaaatagaagaaattaacaatgggcttcataatgttgaaaagatgttgcagcagaaaagcaaaaatattgagaaagctcaagaaattcaaaagaaaatgtgggacgagttagatctatggcattccaaactaaatgagctggattctgaagttcaggacattgttgaacaggacccaggacaggctcaagaatggatggataacttgatgattcctttccagcagtatcagcaagtatcacagagagcagagtgtagaacctcacagttgaataaggccacagttaagatggaggaatatagtgaccttctgaagagcactgaggcttggatagaaaataccagtcatttgctggccaatcctgctgactatgactctttgaggacactgagtcaccatgctagcactgtgcagatggctttggaagattcagaacagaagcacaatcttttacattcaatctttatggatctagaagacctgtcaataatttttgaaacagatgaattaacccaatccatacaagagttaagtaatcaagtaacagctttacaacaaaaaataatggaaagccttccacagattcagcgaatggctgatgatgtggttgctattgaatctgaagtaaaatcaatggaaaaaagagtttcaaaaatcaaaactatcctattatcaaaagaaatatttgatttttcacctgaagaacatctcaaacatggggaggtcatacttgaaaatatacgtcccatgaagaaaaccattgctgagatagtgtcttaccaagtggaactgaggttgccccaaacaggaatgaaacctctgcctgtgtttcagcggacaaatcagcttttacaagatataaaactattggaaaatgtgactcaagaacaaaatgagttattaaaggtagtcataaaacagaccaatgaatgggatgaagaaatagaaaatttgaaacagatcttaaataattattcagctcagttctcccttgaacatatgtcaccagaccaagctgacaagctgccacaactacagggagaaatcgaacgtatggagaaacagattctgagtttgaaccagagaaaagaagacctgttggtggacttgaaggccaccgtactaaaccttcaccagcatttgaagcaagaacaagaaggagtagaaagagataggctgccagctgtaacatcagaggaaggtggagtggcagagagggatgcttctgagcggaagttgaacagaagaggctccatgtcttacctggcagcagtcgaggaagaggtggaagaaagttccgtgaagagcgataatggagatgagaaggcagagccatcgcctcagtcttggtcttcactttggaagcatgacaaggacatggaagaagacagagcttcctcatcctctggaacaattgttcaggaagcatatgggaaaataagcacctctgataattccatggcacaaatcctcacaccagactcactaaacactgagcaaggcccagaatgttccctaaggcccaaccaaacagaagagggcaccacacctcctattgaggctgacactctggactcttctgacgcgcaaggaggtttggagcccagggtggagaaaactaggccggagcccacagaagtcctgcatgcctgcaagacccaggtggccgagctggagctgtggctgcaacaagccaacgtggcagttgagccggaaacattaaacgcagacatgcagcaggtgctggaacagcagctggtagggtgccaggctatgctaacagagattgagcacaaggttgcctttctgttagagacttgcaaagatcagggcctgggagataatggagccactcaacatgaggctgaagcgctttccctgaaactgaaaacagtgaagtgcaatttagaaaaagtccagatgatgcttcaggagaagcacagtgaagatcagcatcctaccattctaaagaaatcctcagagccagagcatcaagaagctctccaaccagttaacctttctgaattggaatccattgtaactgaaaggccacaattcagcagacaaaaagatttccagcagcaacaggttctggagttaaaaccaatggaacagaaagatttcatcaaattcatagaatttaatgctaagaaaatgtggccccagtattgccaacatgataacgatacaactcaggaatcatctgcaagcaaccaggcatccagccctgaaaatgacgttccagactcgatcttgtcaccccagggccaaaatggagataagtggcaatatctgcatcatgaactctcatcaaaaataaagctcccactccctcagcttgtggagcctcaggtttccacaaatatgggtattctacccagcgtgactatgtataactttagatacccaacaactgaagaactgaaaacctataccacccaacttgaagacctgcgccaagaagcaagtaaccttcagacacaggaaaatatgacagaagaagcatatatcaatttggataaaaaattgtttgaactattcctgaccctcagtcagtgcctcagcagtgtggaggagatgctggagatgcccagactttacagggaggatggttctggccagcaggtgcactacgagacgctggctcttgagttgaagaaactttatttagcgctaagtgacaagaagggtgatcttttgaaagccatgacttggcctggcgagaacaccaacttgctccttgaatgttttgacaaccttcaagtctgcctggagcacactcaggctgcagctgtctgtagaagcaagtccctgaaagctggcctcgattacaaccgcagttaccagaatgaaataaagagattatatcatcagctcattaagagtaagacatctttacaacagtctttgaatgaaatcagtgggcagagtgttgctgaacagcttcagaaagcagatgcatatacagtggagctggagaacgccgagagccgagtggccaaactaagagatgaaggggagaggcttcatttaccttatgctttactccaggaggtttacaaattagaggatgtacttgacagtatgtggggaatgctaagagccaggtacacagaactcagcagccctttcgtcactgagagccagcaagatgctttgttgcaaggcatggtggaactggtgaagattgggaaggaaaagcttgctcatggccacttaaaacaaaccaaaagtaaagtggcgttacaggctcaaatagaaaatcacaaggtttttttccagaagcttgttgctgacatgttgttgatccaagcatactctgccaaaatacttccttctttattgcaaaacagagagacattttgggcagaacaagtaacagaagttaaaatactagaagaaaagtcacgccaatgtggtatgaagctgcagagtttgttgcagaaatgggaagaatttgatgaaaactatgcatctcttgaaaaggacctggaaattcttatatctacattgccctctgtgagtttggtggaagaaacagaggaaagattagtggaaaggatttcattttaccagcaaataaaaagaaacattggtggaaaacacgcccggctttaccaaactctgaacgaaggcaaacagttggtggcgtctgtgagctgtcctgaattagagggccagatcgcaaaactggaagagcagtggttgtccctgaacaagaaaattgaccatgagctccacaggctgcaagctcttctcaagcatctgctcagttataacagagattcggatcagttaaccaagtggttggaatcttcccagcatactctgaattactggaaagaacagtccctcaatgtgtctcaggacttggatacaatcagaagcaacatcaacaatttttttgagttttcaaaagaagttgatgaaaaatcctccttgaagactgccgttatcagtatcgggaaccagcttcttcacctgaaagaaactgatacagctacactgagagcttctttagcacagtttgaacaaaaatggacaatgctcataactcaacttccagatattcaagaaaaacttcaccagcttcaaatggagaaattgccgtctcgtaaagcaatcacagaaatgattagctggatgaacaatgtggagcatcaaacttcagatgaagactccgtgcattcaccaagttctgcatctcaagttaaacatcttcttcagaagcacaaggagtttagaatggaaatggactataaacagtggatagttgacttcgttaaccagtcattacttcagctaagcacctgtgatgtagaaagcaagcgctatgaaagaacggagtttgcagagcacctgggggagatgaaccgccagtggcaccgtgtacatggaatgctgaatagaaagatacaacatttagaacaacttctagaaagtatcactgagagtgaaaataaaatacagatcttgaacaactggctggaagcacaagaagagagactgaaaactttacaaaaacctgaaagtgtgatctcagtgcagaagctgctcctggactgtcaggatatagaaaatcaacttgcaattaaatccaaagcactagatgagttgaaacaaagttatctgactttggagagtggggcagtgccattgttagaagatacagcatcccgaattgatgagttatttcaaaagagaagcagtgttctcactcaggtcaatcagctcaaaacctccatgcagtcagttttacaggagtggaagatttatgatcaactctatgatgaagtgaatatgatgacaatccgattctggtactgcatggaacacagcaagcctgtggtgttatcattggagaccttgagatgccaggtggagaaccttcagtctctgcaagatgaagctgagagcagtgaagggagttgggagaaactccaggaggttatcggcaaactcaaaggtctctgcccctctgttgctgaaataatcgaagagaaatgccaaaatactcataaaaggtggactcaggtgaaccaagccattgcagaccagttgcagaaggcccagagtctgctccagctctggaaggcctatagcaatgctcatggtgaagctgccgcaaggctgaagcagcaggaagcaaagtttcaacagctcgcaaacatcagcatgtctggaaacaacctggcagagatcctgcccccagccctgcaggacataaaggagctgcagcatgatgtgcagaaaacaaaagaagcctttctccaaaattccagtgtcctggatcgactcccacaacccgcagagtccagcacccacatgctcctcccgggccccctgcactctctccagagggctgcttatttggaaaagatgctgcttgtgaaagcaaatgaatttgagtttgttctctcacagtttaaggattttggagtccggctggaatctttaaaaggtcttattatgcatgaagaagagaatttggatagacttcaccaacaggaaaaagaaaatcctgactcattcctgaatcatgtgctggcactgacagcccaatcacctgatattgaacatttgaatgaagtgagcctcaagctcccacttagtgacgtagctgtgaagacgttacaaaatatgaaccggcaatggattcgggccacggccacggcactggagcgctgcagtgagcttcagggaattggattgaatgaaaagtttctttattgctgtgaaaagtggatccaacttttggagaagatagaagaagcactcaaagtggatgtggctaacagccttcctgagctcctggagcagcagaaaacctataagatgttagaagctgaagtttctataaaccagacaattgctgattcctatgtcacccagtccttacaactcctggacacaacagaaatagagaacagaccagaatttattacagaattctcaaagctgacggatcggtggcagaatgctgtccagggtgttcggcagaggaagggtgacgttgatgggctggtgaggcagtggcaagatttcactacttctgtggagaacttgtttcgcttcctcactgacaccagccacctgctatctgcagtgaagggccaggagcgcttcagcctctaccaaaccagaagtctgatccatgagctgaagaataaagaaattcattttcaaaggaggcgaactacctgtgccctaaccttggaagctggagaaaagttactgctcacaactgacctgaaaactaaagagtctgtgggtaggagaatcagtcaacttcaggacagctggaaagacatggagccccagctggcagagatgattaagcagttccagagcactgtagagacctgggaccagtgtgaaaagaaaatcaaggagttgaaaagcaggctgcaagttttaaaggcacaaagtgaagatcctcttccagagcttcacgaggacctccataacgaaaaagagctgattaaggaactagaacagtctttggctagctggactcagaacttgaaagaacttcaaactatgaaggcggacttaacccggcacgttctcgtggaagatgtgatggttttgaaggagcaaatagagcatttgcacagacaatgggaggacctctgcttaagggtggccatacgtaaacaggagattgaagacagactcaatacatgggttgtattcaatgaaaaaaataaagagttgtgtgcctggctggtgcagatggaaaacaaagttctacagacagcggacattagtattgaagaaatgattgaaaagttacagaaggactgcatggaagaaataaacttgtttagtgaaaacaagttacagttaaagcagatgggtgaccagttgatcaaggccagcaacaaatcaagagcagctgagatcgatgacaagctcaacaaaattaacgatcgttggcaacatctttttgatgtcatcggatcaagggtgaagaagctgaaggagacctttgcttttattcagcagttggacaaaaacatgagcaaccttcgcacctggttggctcgaattgagtctgagctttccaagcctgttgtttatgatgtctgcgatgatcaagagatccagaagaggctcgctgagcagcaggatctacagcgagatattgaacaacacagcgcaggggtggagtccgtgtttaacatctgtgacgtcctactgcacgactccgatgcctgtgcaaatgagaccgagtgtgactcgatccagcagaccaccaggagcctggacagacgctggaggaacatttgtgccatgtccatggagcggcgcatgaaaatcgaggagacgtggcgcctgtggcagaagtttttagacgactattctcgctttgaggactggctcaagtcagctgagaggacggcagcctgcccaaattcctcagaggtgttgtacacgagtgccaaagaggaactgaagaggtttgaggcctttcagcggcagattcatgagcggctcactcagctggagctcatcaacaagcagtaccggcggctggcccgggagaaccgcacagacacggccagcaggctgaagcagatggtccacgagggcaaccagcgctgggacaaccttcagaggcgggtcacagccgtcctgcggagactcaggcatttcaccaaccagagggaagaatttgagggcaccagggagagcattctggtgtggctcacagagatggacctgcagctgaccaacgtggagcacttctcagagagtgacgccgatgacaagatgcgccaactgaatggcttccaacaggaaattacattaaataccaacaagattgatcagctcattgtgtttggggagcagctgattcagaagagcgagcccctggatgctgtgctgattgaggatgagctggaggaactccaccgctactgccaggaggtgtttggaagggtctcccggttccaccggcggctcacctcctgcactccgggcttggaagatgaaaaggaggcctctgagaatgaaacagacatggaagaccccagagaaatccagactgattcttggcgtaaacggggagagagcgaggaaccgtcatctcctcagtccctgtgtcatctagtggccccagggcacgagcggtctggctgcgagacccctgtcagcgtggactccatccccctggagtgggaccacacaggcgacgtggggggctcctcctctcacgaagaggacgaggagggcccatactacagcgcactgtcaggtaaatccatttcggatggccactcgtggcatgttcccgacagcccttcctgtcccgagcatcactacaagcaaatggaaggtgacaggaatgttccacctgttccccctgcgtccagcaccccttataaaccaccctatggaaagctactattacctccaggcacggatggtggcaaagaaggcccgcgagtcctgaatggcaacccacagcaggaagacgggggactggccggtatcacagagcagcagtcaggtgccttcgacagatgggagatgattcaagcacaggagcttcacaataagctcaaaataaaacaaaatttgcaacagctgaactctgatatcagcgccatcactacttggctgaaaaaaactgaagcagagctggaaatgttaaagatggcaaagcctccctctgatatccaggaaatagaactgagagtgaagagactgcaggagatactgaaagcctttgacacttacaaggcattagtggtctctgtcaacgtgagcagcaaggaatttctgcaaaccgagagccccgaatccacagagctccaaagtagactccgccagctgagcctgctctgggaagcagcacagggcgcagtggacagctggagagggggcttacgacagtcgctcatgcagtgccaggacttccaccagttgagtcaaaatctgctgctgtggttagcgagtgccaagaaccggaggcagaaggctcatgtcaccgatccaaaggcagacccccgggctctcctagagtgtcggagggaactaatgcaactggaaaaggagctggtagaacgtcaacctcaagtggacatgttacaggagatttcaaacagccttctcattaagggacatggagaagactgtattgaagctgaagaaaaggtgcatgttattgagaagaaactcaaacagttacgggagcaagtgtcccaagatttaatggccttgcagggaacccagaacccagcctcacccctgcccagcttcgacgaggtagactcgggggaccagcctcctgcaacatccgtgccagctccccgagcaaagcagttcagagcagtgagaactacagaaggcgaggaggagacagagagcagggtccccggcagcacacggccacagcgctccttcctctcaagggtggtccgggcagccctacccctgcagctgctcctcctgctgctgctgctcctggcctgcctgctgccctcctccgaagaagactacagctgcactcaggccaacaactttgcccggtccttttaccccatgctgaggtacaccaatgggccaccccccacatag

SEQ ID NO: 1398 - DNA, 1296 bp, homo sapiens
atggctgagatcaccaatatccgacctagctttgatgtgtcaccggtggtggccggcctcatcggggcctctgtgctggtggtgtgtgtctcggtgaccgtctttgtctggtcatgctgccaccagcaggcagagaagaagcagaagaacccaccatacaagtttattcacatgctcaaaggcatcagcatatacccagagaccctcagcaacaagaagaaaatcatcaaagtgcggagagacaaagatggtcctgggagggaaggtggacgtaggaacctgttggtggacgcagcagaggctggcctgctaagccgagacaaagatcccagggggcctagctctggatcttgtatagaccaattacccatcaaaatggactatggggaagaactaaggagccctattacaagcctgacccctggggagagcaaaaccacctctccatcatctccagaggaggatgtcatgctaggatccctcaccttctcagtggactataacttcccgaaaaaagccctggtggtgacaatccaggaggcccatgggctgccagtgatggatgaccagacccagggatctgacccctacatcaaaatgaccatccttcctgacaaacggcatcgggtgaagaccagagtgctgcggaagaccctggaccctgtgtttgacgagaccttcaccttctatggcatcccctacagccagctgcaggacctggtgctgcacttccttgtcctcagctttgaccgcttctctcgggatgatgtcattggcgaggtcatggtgccactggcaggggtggaccccagcacaggcaaggtacaactgaccagggacatcatcaaaaggaatatccagaagtgcatcagcagaggggagctccaggtgtctctgtcatatcagcctgtggcacagagaatgacagtggtggtcctcaaagccagacacttgccgaagatggatatcaccggtctctcaggtaatccttatgtcaaggtgaacgtctactacggcagaaagcgcattgccaagaagaaaacccatgtgaagaagtgcactttgaaccccatcttcaatgaatctttcatctacgacatccccactgacctcctgcctgatatcagcatcgagttcctcgttatcgacttcgatcgcaccaccaagaatgaggtggtggggaggctgatcctgggggcacacagtgtcacagccagtggtgctgaacactggagagaggtctgcgagagcccccgcaagcctgtggccaagtggcacagtctgagcgagtactaa

SEQ ID NO: 1399 - DNA, 1584 bp, homo sapiens
atgagtgacactttgacagcggatgtcattggtcgaagagttgaagttaatggagaacatgcaacagtacgttttgctggtgttgtccctcccgtggcaggaccctggttaggagtagaatgggacaatcccgagagaggaaagcatgatgggagccacgaagggactgtgtattttaaatgcaggcacccgacaggaggatcctttattcgtccgaacaaggtaaattttggaacagactttcttactgcaattaagaaccgctatgtgttagaagatggaccagaggaagatagaaaagagcaaattgttacaattggaaataaacctgtggagactatcggttttgactctattatgaaacagcaaagtcagctgagcaagttgcaagaagtttctctgaggaactgtgcagtaagttgtgctggtgaaaaaggaggagttgctgaagcatgtcctaatatcagaaaggtagatttgtcaaaaaacctgttgtcatcatgggatgaagtgatacacattgctgatcagctcagacacctggaagtccttaatgtcagtgaaaataaactaaaatttccctccggttcagtattaactggaacgctttctgtactgaaggttttagtcctcaatcaaacaggaataacgtgggctgaggtgctgcggtgtgtcgcggggtgcccaggcctggaggaactctaccttgagtctaacaacattttcatttccgaaaggccaacagatgttctccagacagtcaagttattagatctttcctctaatcaattaattgatgaaaatcagctgtatctgatagcccacctgcccaggttagaacaattaatcctctctgacactggaatttcttctctacattttccggatgctggaattgggtgcaaaacgtccatgttcccatccttgaagtacctggtagtaaacgacaatcagatatcacaatggtcgtttttcaatgagctagagaagttaccaagtctacgggctttgtcctgcctaagaaaccccctgaccaaagaggacaaagaagcagagacggcgcgactactcattatcgccagcattggccagctgaagacgctgaacaaatgtgagattctccccgaggagaggcggagagctgagcttgactaccgaaaagcttttggaaatgagtggaaacaggctggtggacataaggatccggaaaaaaacagactcagcgaagaattcctcacagcccatcccagataccagttcctctgcctgaaatatggtgcacctgaagattgggaactcaaaacacagcaaccacttatgctgaaaaaccagctactaacactgaagataaaataccctcatcaacttgatcagaaagtcctggagaaacaactgccgggctccatgacaattcaaaaggtgaagggattgctgtcacgtcttctcaaagttcctgtgtcagaccttctgttgtcctatgaaagtcccaaaaagccgggcagagaaatcgagctggaaaatgacctaaagtcattacagttttattctgtggaaaatggagattgtctattagtgcgatggtga

SEQ ID NO: 1400 - DNA, 2049 bp, homo sapiens
atgaatccccagcaacaacgcatggccgctatagggaccgacaaggagctgagcgacctactggacttcagtgcgatgttttccccacctgttaatagtgggaaaactagaccaactacactgggaagcagtcaattcagtggatcaggtattgatgaaagaggaggtacaacatcttggggaacaagtggtcaaccaagtccttcctatgattcatctagaggttttacagacagccctcattacagtgatcacttgaatgacagtcgattaggagcccatgaaggcttgtccccaacacctttcatgaactcaaatctgatgggaaaaacatcagagagaggctcattttccctgtacagcagagatactggattaccaggctgtcaatctagtctcctgagacaagatctggggcttgggagcccagcacagctatcttcttcaggaaaacctgggacagcatactattcattctctgctacaagttccaggaggagaccactccatgactctgcagcgcttgatcccttgcaagcaaaaaaagtcagaaaggtgcctcctggtttgccttcttctgtatatgcaccatccccaaattcagatgatttcaaccgtgaatctcctagttatccatctcctaagccaccaaccagtatgttcgctagcactttctttatgcaagatgggacccacaattcttctgacctttggagttcatcaaatgggatgagccagcctggttttggtggaattctggggacctccacttcccacatgtctcaatccagtagttatggcaaccttcattcacatgaccgcttgagttatcctccacactcagtttcaccaacagacataaacacgagtcttccaccaatgtccagctttcatcgcggcagtaccagcagttcaccttacgttgctgcctcacacactcctcccatcaatggatcagacagcattctaggaaccagagggaatgctgctggaagctcacagacaggtgatgcacttggaaaggctttggcatctatttattctcctgaccataccagcagtagttttccgtcaaatccatcaacaccagttggatcaccttcacctctcacaggtaccagtcagtggccaagacctggagggcaagcaccttcatccccaagctatgaaaactcactccactccctgcagtctcgaatggaggatcgtttagacagactggatgatgcaatccatgtgctgcggaaccatgctgtgggaccttccaccagtttgcctgctggtcacagtgatatacatagtttattgggaccatcccataatgcaccaattggaagcctcaattcaaactatggaggatcaagccttgttgcaagcagtcgatcagcttcaatggttggaactcatcgggaagactctgtcagtctcaatggcaatcattcagtcctgtctagtacagtcactacttcaagcacagacctgaaccataaaacacaagaaaattatagaggtggcttgcaaagtcagtctggaactgttgttacaacagaaatcaagactgaaaacaaagaaaaggatgaaaaccttcatgaacctccttcatcagatgacatgaagtcagatgatgaatcctcccaaaaagatatcaaggtttcatctagaggcagaacaagcagtactaatgaagatgaggatttgaaccctgaacagaagatagaaagggagaaggagaggcggatggctaacaatgccagagaacgcttacgcgtgcgggatattaatgaagcattcaaagagcttggccgaatgtgtcagcttcacttgaagagtgaaaaaccccaaacaaaactccttattcttcatcaagccgtggcagtcatccttagtctagaacagcaagtcagagagaggaaccttaaccccaaagcagcctgccttaagagaagggaagaagaaaaagtttctgccgtatcggcagagccgccaaccacactgccaggaacccatcctgggcttagtgaaactaccaaccctatgggtcatatgtaa

SEQ ID NO: 1401 - DNA, 1791 bp, homo sapiens
atgccgcagctgaacggcggtggaggggatgacctaggcgccaacgacgaactgatttccttcaaagacgagggcgaacaggaggagaagagctccgaaaactcctcggcagagagggatttagctgatgtcaaatcgtctctagtcaatgaatcagaaacgaatcaaaacagctcctccgattccgaggcggaaagacggcctccgcctcgctccgaaagtttccgagacaaatcccgggaaagtttggaagaagcggccaagaggcaagatggagggctctttaaggggccaccgtatcccggctaccccttcatcatgatccccgacctgacgagcccctacctccccaacggatcgctctcgcccaccgcccgaacctatctccagatgaaatggccactgcttgatgtccaggcagggagcctccagagtagacaagccctcaaggatgcccggtccccatcaccggcacacattgtctctaacaaagtgccagtggtgcagcaccctcaccatgtccaccccctcacgcctcttatcacgtacagcaatgaacacttcacgccgggaaacccacctccacacttaccagccgacgtagaccccaaaacaggaatcccacggcctccgcaccctccagatatatccccgtattacccactatcgcctggcaccgtaggacaaatcccccatccgctaggatggttagtaccacagcaaggtcaaccagtgtacccaatcacgacaggaggattcagacacccctaccccacagctctgaccgtcaatgcttccatgtccaggttccctccccatatggtcccaccacatcatacgctacacacgacgggcattccgcatccggccatagtcacaccaacagtcaaacaggaatcgtcccagagtgatgtcggctcactccatagttcaaagcatcaggactccaaaaaggaagaagaaaagaagaagccccacataaagaaacctcttaatgcattcatgttgtatatgaaggaaatgagagcaaaggtcgtagctgagtgcacgttgaaagaaagcgcggccatcaaccagatccttgggcggaggtggcatgcactgtccagagaagagcaagcgaaatactacgagctggcccggaaggagcgacagcttcatatgcaactgtaccccggctggtccgcgcgggataactatggaaagaagaagaagaggaaaagggacaagcagccgggagagaccaatgaacacagcgaatgtttcctaaatccttgcctttcacttcctccgattacagacctgagcgctcctaagaaatgccgagcgcgctttggccttgatcaacagaataactggtgcggcccttgcaggagaaaaaaaaagtgcgttcgctacatacaaggtgaaggcagctgcctcagcccaccctcttcagatggaagcttactagattcgcctcccccctccccgaacctgctaggctcccctccccgagacgccaagtcacagactgagcagacccagcctctgtcgctgtccctgaagcccgaccccctggcccacctgtccatgatgcctccgccacccgccctcctgctcgctgaggccacccacaaggcctccgccctctgtcccaacggggccctggacctgcccccagccgctttgcagcctgccgccccctcctcatcaattgcacagccgtcgacttcttccttacattcccacagctccctggccgggacccagccccagccgctgtcgctcgtcaccaagtctttagaatag

SEQ ID NO: 1402 - DNA, 2514 bp, homo sapiens
atgtcattgtcccacttataccgggatggggaaggccgcattgatgatgatgatgacgagcgggagaactttgagatcactgactgggatctccagaatgagttcaaccccaaccgacagcgccactggcagaccaaggaagaagccacctacggggtgtgggcagagcgagactcggatgatgagaggcccagctttggaggcaaacgggcccgtgactactctgcgccagtcaacttcatcagcgcagggctcaagaaaggggcagcggaggaggcagagttggaagattctgatgacgaagagaaacctgttaagcaggacgactttcctaaggattttggaccaaggaagctaaaaacgggtggcaattttaagcccagccagaaaggttttgcaggaggaaccaaatctttcatggacttcggcagctgggaaagacacacaaaaggaattggacagaagcttcttcagaagatgggctacgtccctggacggggcctcgggaagaatgcacaaggtatcattaacccaattgaagccaagcagagaaagggaaaaggtgctgtgggggcttatggatccgagcgcaccactcagtccatgcaagacttccctgtggttgactcagaggaagaagctgaagaggagtttcagaaggagctgagccagtggaggaaagacccaagtggaagcaagaagaagcccaaatactcttacaagaccgtggaagagttgaaggccaagggcaggattagcaagaagctcactgctccccagaaggaactttctcaagtcaaggtcatagacatgacaggccgggagcagaaggtctactacagctacagtcagatcagccacaagcacaacgttcccgatgatgggctgccgctacagtcccaacagctgccacagtctggcaaagaggccaaggcccccggcttcgcgctgcccgagctggagcacaacctgcagctgctcatcgacctcacggagcaggagatcatccagaatgaccggcagctacagtatgagcgggacatggtggtcaacctcttccacgagctggagaagatgaccgaggtcctggaccacgaggagcgggtcatctcgaacctcagcaaggtcctggagatggtggaggagtgcgagcggcggatgcagcccgactgcagcaaccccctcaccctggacgagtgtgcccgcatcttcgaaaccctgcaggacaagtactatgaggagtacaggatgtccgaccgtgtggaccttgctgtggccatcgtctatccactcatgaaggagtacttcaaggagtgggatcccctcaaagactgcacttatggcaccgagatcatctctaagtggaaaagcctcctagagaatgaccagctcttgtcccatggcggacaggacctctcagcagatgcctttcacaggttgatatgggaagtctggatgccttttgttcgaaatattgtcacccagtggcagccaaggaactgtgacccgatggtggactttttggatagttgggtgcacattattcctgtgtggatcttagataacatactggaccaactcatcttccccaagctgcaaaaggaggtggaaaactggaacccgctcacagacactgttcccatccactcttggatccacccatggctgccccttatgcaggcacggctggagccactctattcccccatccgtagtaagctgtccagcgccctgcagaagtggcaccccagcgactcctctgccaagctcatcctccagccctggaaggatgtcttcactcctggctcctgggaagcattcatggtcaaaaacatagtgcccaagctggggatgtgtcttggtgagctagtcattaacccccaccagcagcacatggatgcattctattgggtgattgactgggaagggatgatctctgtctctagcctggtgggacttcttgaaaagcacttcttccccaagtggcttcaggtgctgtgctcttggctcagtaacagcccaaattatgaggagatcaccaagtggtacctgggttggaagtcgatgttctcagaccaagtgctggcacatccatctgtcaaggacaaatttaatgaggcacttgatatcatgaaccgggcggtgtcctccaacgttggtgcctacatgcagccaggagcacgggagaacattgcctatctcacccacacggagcggaggaaggacttccagtacgaggccatgcaggagaggcgggaggctgagaacatggctcagaggggcattggcgtggccgctagctctgtgcccatgaactttaaggacctcattgagaccaaggctgaggagcacaacattgtcttcatgcccgtcattgggaagcgacacgaagggaagcagctctacacctttggccgcattgtgatctacatcgaccggggagtggtctttgtccagggcgagaagacgtgggtgcccacctcactgcagagcctgatcgacatggccaagtga

SEQ ID NO: 1403 - DNA, 2562 bp, homo sapiens
atgtgctgcgagaagtggagccgcgtggcggaaatgtttctcttcattgaggagcgggaggattgtaagatactgtgcctttgctccagggcatttgtggaggatcgaaaattgtacaatttgggattaaaaggctattacatcagagacagtggcaacaattcaggagaccaggcgacagaagaagaggaaggtggttattcctgtggtactgcagaatcacatgacagcaaaggcataggcctggatgaaagtgaacttgattctgaggctgaactcatgagaagtatgggattgccacttcaatttggtaggataactgcacataaggattttgaggtatctatgaatactagaaataaagttaaaataaaaaagaaaaaacatcaaaagaaatacttagatgaaattgtgcaagaatcttggagaaaagaatatgaagaagacgacattttggcttcagatgatccatcttcaattgaacagtatgagaacaccagaacatatgaacttcaaagcaaaaaagatactgagacagaaaatcctccagttgaaaacacattatctccaaagctagaaattacagagaaatgggaaaagtattggaatgaatatggaggaggactattgtggcaaagttggcaagaaaaacatccgggtcaagcactatcttctgaaccttggaactttcctgatacaaaggaagaatgggagcaacattatagtcaactttattggtattatttggaacaatttcagtattgggaagctcagggttggacttttgatgcctcgcaaagctgtgatacagatacttacacatctaaaacagaagctgatgacaagaacgatgaaaaatgcatgaaagttgacttagtatcttttccatcttcacctattatggttgataatgatagctctggtacaagtgataaggatcatagtgaaatacttgatggaattagtaacataaaactgaattcagaggaagtaacacagagccaattagattcctgtacaagtcatgatggtcatcaacagctaagtgaagttagtagcaaaagagagtgccctgcttccggccaaagtgaaccacgtaatggaggaaccaatgaggaaagcaactcatcggggaatacaaacacagacccaccagctgaggattcacagaagtcttcaggagcaaacacaagcaaagacagaccacatgccagtggtactgatggagatgaaagtgaggaagacccacctgagcataagccaagcaaactgaagaggagccatgaactggacattgatgaaaacccagcttcagactttgatgacagtggttcccttctaggattcaagtatggctcaggacaaaaatatggtggaatcccaaatttcagtcatcggcaggtcaggtatttagagaagaatgtgaagcttaagtctaagtacctagacatgcgcagacaaataaagatgaaaaacaaacacatcttctttaccaaagagtcagaaaaaccatttttcaagaaaagcaaaattctgagtaaggtagaaaaattcctcacatgggttaataaaccaatggatgaagaagcatcacaggaatcatcttctcatgacaatgtgcacgacgcttccacaagtagtgattcagaggaacaagacatgtctgttaaaaaaggtgatgacctactggagactaataatccagaacctgaaaagtgtcagagcgtatcttcagctggtgaacttgaaacagaaaactatgaaagagacagcttgctagcaactgttccagatgagcaggattgtgttactcaagaagtgccagactcccgccaggcagaaactgaagctgaagtgaaaaagaagaagaacaagaagaagaacaaaaaggtgaatggtctgcctcctgaaatagctgctgttcctgagctggcaaaatactgggcccagaggtacaggctcttctcccgttttgatgatgggattaagttggacagagagggctggttttcagttacacccgagaagattgctgaacacattgctggccgtgttagtcagtccttcaagtgtgacgttgtagtagacgcattctgtggagttggaggaaataccattcagtttgccttaacaggaatgagagtgattgccattgatatcgatcctgttaagattgcccttgctcgcaataatgcagaagtttatgggatagcagataagatagagttcatctgtggagatttcttgctgctggcttcttttttaaaggctgatgttgtgttcctcagcccaccttggggagggccagactatgccactgcagagacctttgacattagaacaatgatgtctcctgatggctttgaaattttcagactttctaagaagatcactaataatattgtttattttcttccaagaaatgctgatattgaccaggtggcatccttagctgggcctggagggcaagtggaaatagaacagaacttccttaacaacaaattgaagacaatcactgcatattttggtgacctaattcgaagaccagcctctgaaacctaa

SEQ ID NO: 1404 - DNA, 4782 bp, homo sapiens
atggcggccgcggctgtggtggttcccgcagagtggataaagaactgggagaaatcagggagaggcgaatttttgcatttatgtcggatcctcagtgaaaataaaagccatgatagttcaacatacagagatttccagcaagctctctatgagttgtcatatcatgtaattaaaggaaatctaaagcatgaacaggcatctaatgttcttagtgacattagtgaatttcgtgaggatatgccctccattcttgctgatgtattctgcatattagacattgagacaaattgtttagaagaaaaaagcaagagagactattttacacagttggtattagcatgtttgtatttagtttcagacacagttctaaaggaacgcctggatccagaaacactggaatcattagggcttatcaaacaatcacagcaattcaatcaaaagtcagttaaaatcaagacaaaactcttttataagcagcaaaaattcaatttgttaagagaagagaatgaaggttatgccaagctgattgctgaattggggcaagatttatctggaagtattactagtgatttaatcttagaaaatatcaaatctttaataggatgctttaatctggatcccaatagagttttggatgtcattttagaagtgtttgaatgcaggccagaacacgatgacttctttatatctttgttagaatcttacatgagtatgtgtgaaccgcaaacactgtgtcatattcttgggttcaaattcaagttttaccaggaaccaaatggcgagacaccatcatctttatacagagttgcagcagtacttctacaatttaatcttattgatttagatgatctttatgtacatcttcttccggctgataattgcattatggatgaacacaaacgagaaattgcggaagctaagcaaattgttagaaagcttacgatggttgtgttgtcttctgaaaaaatggatgagcgagagaaagaaaaggaaaaagaagaggagaaagtagagaaaccacctgataaccaaaaacttggcttgttggaagccttattaaagattggtgattggcaacatgcacagaacattatggatcagatgcctccatactatgcagcttcacacaagctaatagcccttgctatttgcaagctcattcatataactattgagcctctctaccgaagagttggagttcctaaaggtgctaaaggctcacctgttaatgctttgcaaaacaagagagcaccaaaacaagctgagagctttgaagatttgaggagagacgtgttcaatatgttctgttaccttggtcctcacctttctcacgatcccattttatttgcaaaagtggtgcgcataggcaagtcatttatgaaggagtttcagtctgatggaagcaaacaagaagataaagaaaaaacggaagttatccttagctgtttgcttagcattactgaccaggtactacttccatctctttctttgatggactgcaatgcttgtatgtctgaggaactatggggaatgtttaaaacatttccatatcagcatagatatcgtctgtatggccagtggaagaatgaaacttataacagtcacccacttttagtaaaagttaaagctcaaacaatagacagagccaaatatatcatgaagcgcctaaccaaggaaaatgtgaagccttctggaagacaaattgggaagttgagccacagcaatccaaccattttgtttgattatatcttgtcacaaatacagaagtatgataacttaataacacctgtagtagattcattgaaatacctcacttcactgaattatgatgtcttggcctattgtatcattgaagctttagctaatccagaaaaggaaagaatgaaacatgatgacacaaccatctcaagctggcttcagagtctggctagtttctgtggtgcagtttttcgtaaatatccaattgatcttgctggtcttcttcagtatgttgccaatcagctaaaggcgggcaaaagttttgacctgcttatattgaaagaagtggtacaaaaaatggcaggaatagaaattacagaggaaatgacaatggagcaactagaggctatgactggtggagagcagctaaaagctgagggtggttattttggtcagatcagaaacactaaaaaatcctctcagagattaaaggatgctctattggaccatgatcttgcccttcctctctgtctgcttatggctcagcagagaaatggggtaatctttcaggaaggtggagagaaacatttgaaacttgtgggaaagctctatgaccagtgtcatgataccctggtgcagtttggtgggtttttagcatctaatctgagcacagaagattatataaagcgagtgccttcaattgatgtactctgtaatgaatttcatacaccccatgatgcagcatttttcctgtctaggccaatgtatgcccatcatatttcgtcaaagtatgatgaacttaaaaaatcagaaaagggaagtaaacagcaacataaagttcataagtacattacatcatgtgagatggtgatggcgcctgtccatgaagcagtggtctccttacatgtttccaaagtctgggatgacatcagccctcaattctatgctacattctggtcattgacaatgtatgaccttgcagttccacacaccagctatgaacgagaagtcaataaacttaaagtccagatgaaagcaattgatgacaatcaggaaatgcccccaaataaaaagaaaaaagagaaggagcgctgtactgcccttcaggacaagcttcttgaagaagaaaagaaacagatggaacatgtacagagagttctacagagattgaaactggaaaaggacaactggcttttagcaaaatctaccaaaaatgagaccatcacaaaatttctacagctgtgtatatttcctcgatgtattttttcagcaattgatgctgtttactgtgctcgttttgttgaattggtacatcaacagaaaactccaaatttttccacacttctttgctatgatcgagttttctctgacataatttacacagttgcaagctgtactgaaaatgaagccagtcgatacggaaggtttctttgctgcatgttagagactgtgaccaggtggcatagtgatagagccacatatgaaaaggaatgtggaaactatccaggattccttaccatattacgggcaactggatttgatggtggaaataaggctgatcaattagactatgaaaattttcgacatgttgtacataaatggcattacaaactaaccaaggcatcggtacattgccttgaaacaggcgaatatactcacatcaggaatatcttgattgtgctaacaaaaatacttccttggtacccaaaagttttgaatctgggtcaagctttggaaagaagagtacacaaaatctgccaagaagaaaaagagaagaggccagatctatatgcattggctatgggctactctgggcagttgaaaagtagaaagtcatacatgatacctgaaaatgagtttcatcacaaagacccccctccgaggaatgcagttgccagtgtgcaaaatgggcctggtggtgggccttcttcatcatcaataggaagtgcatctaaatcggatgaaagcagtactgaggagactgataaatcaagggagagatctcagtgtggtgtgaaagctgttaataaagcttctagtaccacacctaaagggaattcaagcaatggaaatagtggctctaacagcaacaaagctgttaaagaaaatgacaaagaaaaagggaaagagaaagaaaaagagaaaaaagaaaagactccagctactactccagaggccagggtacttggtaaagatggtaaagaaaaaccaaaggaagagcggccaaataaagatgaaaaagcaagagagaccaaggaaagaacgccgaagtctgacaaagagaaagaaaaattcaagaaggaagaaaaagctaaagatgagaaatttaagaccactgtccccaacgcagaatcaaaatcaactcaagaaagggaaagagagaaggagccatccagagaaagagatatagcaaaggaaatgaaatcaaaggaaaatgttaaaggaggagaaaaaacaccagtttctgggtccttgaaatcacctgttcccagatcagatattccagagcctgaaagggaacaaaaacgccgcaaaattgatactcacccttctccatcacattcctccacagtaaaggacagtctcatcgaactcaaggaatcttcagcaaagctctacattaatcatactcctccaccactgtccaagagtaaggagagagaaatggacaagaaagatttggacaagtcaagggaaagatccagagaaagagagaaaaaagatgaaaaggacaggaaagagcggaaaagggatcactcaaacaacgaccgtgaagtgccaccggacttaaccaagagacgtaaagaggagaatggaacaatgggggtttcaaaacataaaagtgaaagtccttgtgaatctccttatccaaatgagaaagacaaggaaaaaaataagtcaaaatcttcaggcaaagaaaaaggcagtgattcatttaaatctgagaagatggataaaatctcctccggtggcaaaaaggagtccaggcatgataaagaaaagatagaaaagaaagagaaacgggacagttcaggaggaaaggaagagaagaaacatcataagtcctcggacaagcacagataa

SEQ ID NO: 1405 - DNA, 1128 bp, homo sapiens
atggaggacgagatgcccaagactctatacgtcggtaacctttccagagatgtgacagaagctctaattctgcaactctttagccagattggaccttgtaaaaactgcaaaatgattatggatacagctggaaatgatccctattgttttgtggagtttcatgagcatcgtcatgcagctgcagcattagctgctatgaatggacggaagataatgggtaaggaagtcaaagtgaattgggcaacaacccctagcagtcaaaagaaagatacaagcaatcatttccatgtctttgttggtgatctcagcccagaaattacaactgaagatataaaagctgcttttgcaccatttggaagaatatcagatgcccgagtggtaaaagacatggcaacaggaaagtctaagggatatggctttgtctcctttttcaacaaatgggatgctgaaaacgccattcaacagatgggtggccagtggcttggtggaagacaaatcagaactaactgggcaacccgaaagcctcccgctccaaagagtacatatgagtcaaataccaaacagctatcatatgatgaggttgtaaatcagtctagtccaagcaactgtactgtatactgtggaggtgttacttctgggctaacagaacaactaatgcgtcagactttttcaccatttggacaaataatggaaattcgagtctttccagataaaggatattcatttgttcggttcaattcccatgaaagtgcagcacatgcaattgtttctgttaatggtactaccattgaaggtcatgttgtgaaatgctattggggcaaagaaactcttgatatgataaatcccgtgcaacagcagaatcaaattggatatccccaaccttatggccagtggggccagtggtatggaaatgcacaacaaattggccagtatatgcctaatggttggcaagttcctgcatatggaatgtatggccaggcatggaaccagcaaggatttaatcagacacagtcttctgcaccatggatgggaccaaattatggagtgcaaccgcctcaagggcaaaatggcagcatgttgcccaatcagccttctgggtatcgagtggcagggtatgaaacccagtga

SEQ ID NO: 1406 - DNA, 2301 bp, homo sapiens
atgagtgtccaaagtagcagtggaagtttggaggggccgccatcttggtcccagctctccacgtctccaaccccgggctcggcggcggcggccaggtccctgctgaatcacacgccgccatccgggaggcccagggaaggtgcaatggatgagcttcatagtctggatccaagaaggcaagagttattggaagctagatttactggagttgcaagtgggagcactggaagtacgggcagttgcagtgttggagctaaagcctcaacaaataacgaaagctctaatcacagttttggaagcttgggatctttaagtgacaaagaatcagagacaccggagaagaaacaatcggaatcatccaggggaagaaagagaaaagcagaaaaccagaatgaaagtagtcagggaaaaagtattgggggacgtggccacaaaattagcgactattttgaataccagggtggaaatggctcaagtccagtaagaggcatacctcctgcaatccgttctcctcaaaattcacattcacattccactccttcctcatctgttcgaccgaatagcccttctcctactgcattagcatttggggaccaccctattgtacaaccaaagcaattatcctttaaaattattcagactgatctcacaatgctgaaattagcagcattagaaagtaataaaatccaggacctggaaaagaaggagggacgtatagatgatttgctcagggctaactgtgatctcagacggcaaatagatgaacaacaaaaattacttgaaaaatacaaagaacgattaaataagtgcatatcaatgagcaagaaacttcttattgaaaagagtacacaagaaaagctgtcaagcagagagaagagtatgcaagatcgattacgcctcgggcactttacaacagttagacatggcgcttcatttactgaacaatggacagatggttttgcatttcagaatcttgtgaagcaacaagaatgggtgaatcagcaaagggaagatattgaaaggcaaaggaaacttctagccaaacgcaaacctcccacagctaataattctcaggcaccctctaccaattctgaaccaaaacaaaggaaaaacaaagcagtcaatggagcagagaatgatccctttgttagaccaaatttaccacaactgttgactttggcagaatatcatgaacaggaagaaattttcaaacttagactaggacatctcaaaaaggaagaggcagaaatccaggcagaacttgaacgtttggaaagagtcagaaatcttcacatacgtgagctgaaaagaataaacaatgaagataattcacagttcaaagatcacccaacattaaatgaaagatatttattacttcatctgcttggtagaggtggctttagtgaagtgtataaggcttttgacctttatgaacaaagatatgctgctgtgaagatacatcagcttaataaaagctggagagatgagaagaaagaaaactaccacaaacatgcctgcagagagtatagaatacacaaagaactggatcaccccagaatagttaaactctatgattatttctccttggatacagatacgttttgtacagtgttagaatactgtgaaggcaatgacttggatttctatctgaagcaacacaagttaatgtcagagaaagaagctcggtctattgtaatgcagattgtaaatgcactaagatatctcaatgagatcaaaccccctattatacattatgatcttaagccaggaaacatcctactggtagatggaacagcatgtggtgaaatcaaaatcactgattttggtctgtccaagattatggatgatgatagctatggtgtagatggaatggatctaacttcccagggggcaggcacttactggtatttacctcctgagtgttttgtagttggaaaagagccaccaaagatttccaacaaggttgatgtatggtcggttggagtcatcttctttcagtgtctttatggtagaaagccatttggtcacaatcaatctcaacaagacattcttcaagaaaatacaatattaaaagccacagaagtccagttccctgtaaaaccggttgtaagcagtgaagccaaggcatttataagacgctgtttggcatatcgaaaagaagatcgatttgatgtgcaccagctggcaaatgacccataccttctcccacacatgagaagatcaaattcttcaggaaacctacacatggctgggctgacagcatcccctacacccccttcttcaagcataattacttactga

SEQ ID NO: 1407 - DNA, 1668 bp, homo sapiens
atggcggcggctgcgtggcttcaggtgttgcctgtcattcttctgcttctgggagctcacccgtcaccactgtcgtttttcagtgcgggaccggcaaccgtagctgctgccgaccggtccaaatggcacattccgataccgtcggggaaaaattattttagttttggaaagatcctcttcagaaataccactatcttcctgaagtttgatggagaaccttgtgacctgtctttgaatataacctggtatctgaaaagcgctgattgttacaatgaaatctataacttcaaggcagaagaagtagagttgtatttggaaaaacttaaggaaaaaagaggcttgtctgggaaatatcaaacatcatcaaaattgttccagaactgcagtgaactctttaaaacacagaccttttctggagattttatgcatcgactgcctcttttaggagaaaaacaggaggctaaggagaatggaacaaaccttacctttattggagacaaaaccgcaatgcatgaaccattgcaaacttggcaagatgcaccatacatttttattgtacatattggcatttcatcctcaaaggaatcatcaaaagaaaattcactgagtaatctttttaccatgactgttgaagtgaagggtccctatgaatacctcacacttgaagactatcccttgatgatttttttcatggtgatgtgtattgtatatgtcctgtttggtgttctgtggctggcatggtctgcctgctactggagagatctcctgagaattcagttttggattggtgctgtcatcttcctgggaatgcttgagaaagctgtcttctatgcggaatttcagaatatccgatacaaaggagaatctgtccagggtgctttgatccttgcagagctgctttcagcagtgaaacgctcactggctcgaaccctggtcatcatagtcagtctgggatatggcatcgtcaagccacgccttggagtcactcttcataaggttgtagtagcaggagccctctatcttttgttctctggcatggaaggggtcctcagagttactggggcccagactgatcttgcttccttggcctttatccccttggctttcctagacactgccttgtgctggtggatatttattagcctgactcaaacaatgaagctattaaaacttcggaggaacattgtaaaactctctttgtatcggcatttcaccaacacgcttattttggcagtggcagcatccattgtgtttatcatctggacaaccatgaagttcagaatagtgacatgtcagtcggactggcgggagctgtgggtagacgatgccatctggcgcttgctgttctccatgatcctctttgtcatcatggttctctggcgaccatctgcaaacaaccagaggtttgccttttcaccattgtctgaggaagaggaggaggatgaacaaaaggagcctatgctgaaagaaagctttgaaggaatgaaaatgagaagtaccaaacaagaacccaatggaaatagtaaagttaacaaagcacaggaagatgatttgaagtgggtagaagagaatgttccttcttctgtgacagatgtagcacttccagcccttctggattcagatgaggaacgaatgatcacacactttgaaaggtccaaaatggagtaa

SEQ ID NO: 1408 - DNA, 705 bp, homo sapiens
atggacccagggctgcagcaagcactcaacggaatggcccctcctggagacacagccatgcatgtgccggcgggctccgtggccagccacctggggaccacgagccgcagctatttctatttgaccacagccactctggctctgtgccttgtcttcacggtggccactattatggtgttggtcgttcagaggacggactccattcccaactcacctgacaacgtccccctcaaaggaggaaattgctcagaagacctcttatgtatcctgaaaagggctccattcaagaagtcatgggcctacctccaagtggcaaagcatctaaacaaaaccaagttgtcttggaacaaagatggcattctccatggagtcagatatcaggatgggaatctggtgatccaattccctggtttgtacttcatcatttgccaactgcagtttcttgtacaatgcccaaataattctgtcgatctgaagttggagcttctcatcaacaagcatatcaaaaaacaggccctggtgacagtgtgtgagtctggaatgcaaacgaaacacgtataccagaatctctctcaattcttgctggattacctgcaggtcaacaccaccatatcagtcaatgtggatacattccagtacatagatacaagcacctttcctcttgagaatgtgttgtccatcttcttatacagtaattcagactga

SEQ ID NO: 1409 - DNA, 423 bp, homo sapiens
atgtctgggagcttctactttgtaattgttggccaccatgataatccagtttttgaaatggagtttttgccagctgggaaggcagaatccaaagacgaccatcgtcatctgaaccagttcatagctcatgctgctctcgacctcgtagatgagaacatgtggctatcgaacaacatgtacttgaaaactgtggacaagttcaacgagtggtttgtgtcggcatttgtcactgcggggcatatgaggtttattatgcttcatgacataagacaagaagatggaataaagaacttctttactgatgtttatgatttatatataaagttttcaatgaatccattttatgaacccaattctcctattcgatcaagtgcatttgacagaaaagttcagtttcttgggaagaaacaccttttaagctga

SEQ ID NO: 1410 - DNA, 5940 bp, homo sapiens
atgtcgtcctggcttgggggcctcggctccggattgggccagtctctgggtcaagtcgggggcagcctggcttccctcactggccagatatcaaactttacaaaggatatgctgatggagggcacggaggaagtggaagcagaattacctgattctaggacaaaggaaattgaagccattcatgcaatcttgagatcagagaatgaaaggcttaagaaactttgtactgatctagaagagaaacatgaagcatcagagattcaaataaagcagcaatctacaagttaccgaaatcaacttcaacaaaaagaggtagaaatcagccatcttaaagccagacagattgcactccaggatcagttgctgaaactgcagtcagctgctcagtcagtaccttcaggagctggtgtaccagcaaccactgcatcatcttcattcgcttatgggattagtcatcatccttcagctttccatgacgatgacatggactttggtgatataatttcatcccaacaagaaataaaccgactctcaaatgaagtttcaagacttgagtctgaagttggccattggaggcatattgctcagacttccaaagcacaaggaacagataactctgatcaaagtgaaatatgtaaactacaaaatatcattaaggaactaaaacagaaccgaagtcaggaaattgatgaccatcaacatgaaatgtcagtactgcagaatgcacaccaacagaaattgacagaaataagtcgacgacatcgagaagaattaagtgactatgaagaacgaattgaagaacttgaaaatctgttacaacaaggtggctctggagttatagaaactgatctctctaaaatctatgagatgcaaaaaactattcaagttctacaaatagaaaaagtggagtctaccaaaaaaatggaacaacttgaggataaaataaaagatataaataaaaaattatcttctgcagaaaatgacagagatattttgaggagagaacaagaacagctaaatgtggaaaagagacaaataatggaagaatgtgaaaacttgaaattggaatgtagtaaattgcagccttctgctgtgaagcaaagtgatactatgacagaaaaggaaagaattcttgcccagagtgcatcagtggaagaagtgttcagactacaacaagcactgtctgatgccgaaaatgaaataatgagattgagtagtttaaaccaggataacagtcttgctgaagacaatctgaaacttaaaatgcgtatcgaagttttagaaaaagagaagtcattactgagtcaagaaaaggaagaacttcagatgtcacttttaaaattgaacaatgaatatgaagtaattaaaagtacagctacaagagacataagtttggattcagaattacatgacttaagacttaatttggaggcaaaggaacaagaactcaatcagagtattagtgaaaaggaaacactgatagctgagatagaagaattggacagacagaatcaagaagctacaaagcacatgattttgataaaagatcagctatcaaaacaacaaaatgaaggagatagcatcatcagtaaactgaaacaagatctaaatgatgaaaaaaagagagttcatcaacttgaagatgataaaatggacattactaaagagttagatgtacagaaagaaaagctaattcaaagtgaagtggccctaaatgatttacatttaaccaagcagaaacttgaggacaaagtagaaaatttagtagatcagctaaataaatcacaagaaagtaatgtaagcatccagaaggagaatttagaacttaaggagcatattagacaaaatgaggaggagctttctagaataaggaatgagttaatgcagtctctaaatcaagactctaatagtaattttaaggataccttacttaaagaaagagaagctgaagttagaaacttaaagcaaaatctttcagaattagaacagctcaatgaaaatttaaagaaagttgcttttgatgtcaaaatggaaaatgaaaagttagttttagcatgtgaagatgtgaggcatcagttagaagaatgtcttgctggtaacaatcagctttctctggaaaaaaacactattgtggagactctaaaaatggaaaaaggagagatagaggcagaattgtgttgggctaaaaagaggctgttggaagaagcaaacaagtatgagaaaaccattgaagaactgtcaaatgcacgtaatttgaatacctctgccttacagctggaacatgagcatttaattaaactcaatcaaaagaaagacatggaaatagcagaactcaaaaagaatattgaacaaatggatactgaccataaagaaactaaggacgttttgtcatctagtttagaagagcagaagcagttgacacaacttataaacaagaaagaaatttttattgaaaagcttaaagaaagaagttcaaagctgcaggaggaattggataaatattctcaggccttaagaaaaaatgaaattttaagacagaccatagaggaaaaagaccgaagtcttggatccatgaaagaggaaaataatcatctgcaagaagaattggaacgactcagggaagagcagagtcgaaccgcacctgtggctgaccctaaaacccttgatagtgttactgaactagcatctgaggtatctcaactgaacacgatcaaggaacatcttgaagaggaaattaaacatcatcaaaagataattgaagatcaaaaccagagtaagatgcaactacttcagtctttacaagagcaaaagaaggaaatggatgagtttagataccagcatgagcaaatgaacgccacacacacccagctctttttagagaaggatgaggaaattaagagtttgcaaaaaacaattgaacaaatcaaaacccagttgcatgaagaaagacaggacattcaaacagataactctgatatttttcaagaaacaaaagttcagagccttaatatagaaaatggaagtgaaaagcatgatttatctaaagctgaaacggaaagattagtgaaaggaataaaagagcgagaactggagattaaacttctaaatgaaaagaatatatctttaactaaacagattgatcagttgtccaaagatgaagttggtaaactaactcagattattcagcagaaagatttggagatacaagctcttcatgctagaatttcttcaacttcccatactcaagatgttgtttaccttcaacagcaactgcaggcttatgctatggaaagagaaaaggtatttgctgttttgaatgagaagactagggaaaatagccatctaaaaacagaatatcacaaaatgatggatattgttgctgccaaggaagcagctcttatcaaactgcaagatgaaaataaaaaattgtccactagatttgaaagtagtggccaagatatgtttagagaaactattcagaatttatcacgtatcattcgagaaaaagacatcgaaatagatgcactaagtcagaaatgtcagactttattggcagttttacaaacatccagcactggtaatgaggctggaggtgttaatagtaatcaatttgaggagcttctacaggaacgtgacaagttaaaacagcaagtaaagaaaatggaagagtggaagcagcaggtgatgaccacagtacaaaatatgcaacacgagtcagcccagcttcaggaagagcttcaccaacttcaagcacaggttttggttgacagtgataataattctaaattacaagtggactatactggcctgatccaaagttatgagcagaatgaaaccaaactcaaaaattttgggcaggaattagcacaagttcagcacagcattgggcagctttgcaataccaaggatcttcttttaggaaaacttgatattatttcaccccagctgtcttctgcatcattgcttactccccagtctgcagagtgtcttagagcaagtaagtctgaagtattgagtgaatcttctgaattgcttcagcaagagttagaagagctaagaaaatcactacaggaaaaagatgcaacaattagaactctccaggaaaataaccacagattgtctgattcgattgctgccacctcagagctagaaagaaaagaacacgaacaaaccgattcagaaatcaagcagctaaaggagaaacaagatgttttgcaaaagttacttaaggaaaaagacctcttaatcaaagccaaaagtgatcaactactttcttccaatgaaaatttcactaacaaagtaaatgaaaacgaacttttgaggcaggcagtaacaaacctgaaggagagaatattaattctagagatggacattggcaaactaaaaggagaaaatgaaaaaatagtggaaacatacaggggaaaggaaacagaatatcaagcgttacaagagactaacatgaagttttctatgatgctgcgagaaaaagagtttgagtgccactcaatgaaggagaaggctcttgcttttgaacagctattgaaagagaaagaacagggcaagactggagagttaaatcagcttttaaatgcagttaaatcaatgcaggagaagacagttgtgtttcaacaggagagagaccaagtcatgttggccctgaaacaaaaacaaatggaaaatactgccctacagaatgaggttcaacgtttacgtgacaaagaatttcgttcaaaccaagagctagagagattgcgtaatcatcttttagaatcagaagattcttatacccgtgaagctttggctgcagaagatagagaggctaaactaagaaagaaagtcacagtattggaggaaaagctagtttcatcctctaatgcaatggaaaatgcaagccatcaagccagtgtgcaggtagagtcattgcaagaacagttgaatgtagtttccaagcaaagggatgaaactgcgctgcagctttctgtctctcaggaacaagtaaagcagtatgctctgtcactggccaacctgcagatggtactagagcatttccaacaagaggaaaaagctatgtattctgctgaactcgaaaagcaaaaacagcttatagctgaatggaagaaaaacgcagaaaatctggaaggaaaagtgatatcattacaggaatgtttggatgaagcaaatgctgcattggattcagcatcaagacttacagaacagttagatgtaaaagaagaacaaattgaagaacttaaaagacaaaatgagctccgacaagaaatgctggatgatgtacaaaagaaattgatgagcttagcaaacagctcagaaggaaaagtagacaaagtcctaatgagaaacctcttcattggtcatttccacacaccgaaaaatcagcgtcatgaagtgttacggttaatggggagcatcctgggcgtcagaagggaggagatggagcagttgtttcatgacgatcagggcggtgttaccaggtggatgactgggtggcttggaggaggatcaaaaagtgttcccaacacacctttgagaccaaatcagcaatctgtggttaatagttctttttcagaactttttgttaaatttctagaaacagaatctcatccatccattccaccaccaaagctttctgttcatgatatgaaacctctggattcaccaggaagaagaaaaagagatacaaatgcaccagaaagttttaaagatacagcagaatccaggtctggtagaagaacagatgtaaatccgtttttggctcctcgctcggcagctgtacctcttattaacccagctggacttggacctggtgggcccgggcatcttcttctgaaacccatctcagatgttttgcccacatttacacctttgccagcgttacctgacaacagtgctggggttgtgctgaaagaccttttaaagcaatag

SEQ ID NO: 1411 - DNA, 3426 bp, homo sapiens; identical to SEQ ID NO: 1132

SEQ ID NO: 1412 - DNA, 2532 bp, homo sapiens
atgtggaccccggagctggcaattctgaggggattccccactgaggctgagcggcagcaatggaaacaggagggggtcgtcggttcagagagtggatctttcctacaattgctactggaagggaactatgaagccatattcttaaattcaatgactcaaaatatttttaattcaacaacaaccgctgaagaaaagattgatagctacctggagaagcaggtagtaacattcctggattactcaacagatttggacacaacggaaagacaacagttgatatttctacttggtgtgagcagtttgcaactttttgttcagagcaactggacggggccccctgttgacttacaccctcaggactttttgtcatctgttttgttccagcaattcagtgaggttaaaggactggatgcatttgttctgagcctgctcactctagatggtgaatcaatctacagcctgacctcgaagcctatactactgttattagcacgcattatcctagtgaatgtaagacataaactgacagctattcagagcttgccatggtggactttgagatgtgtgaatattcatcagcatttgcttgaggaacgctcacctctgctttttactcttgccgaaaactgtattgatcaagtgatgaaactacagaatctgtttgtagatgattcaggtcgatatttggctattcaattccatctggaatgtgcatatgtgtttttatattattatgagtacagaaaagcaaaagatcagttggatattgctaaggacatcagccaattacaaattgatttgacaggtgctttgggaaaaagaacacggttccaggaaaattatgtggcacaactgattctagatgtaagaagggaaggggatgtcctttcaaattgtgaattcactccagcacccactcctcaggaacatttaaccaagaatcttgagctcaatgatgacaccattctgaatgacataaagttagcagattgtgaacagttccagatgccggatctgtgtgctgaagagatcgctattattcttggaatctgcactaattttcaaaagaataacccagtgcacacattaactgaagtggagcttctggcatttacatcatgtttgctttcacaaccaaagttctgggccattcagacatcagccttgatcctccggacaaaacttgagaaaggaagtactcgccgagtggaacgggcaatgaggcagacacaggctcttgcagaccaatttgaagataaaactacatctgtattggaacgcctgaagattttctattgctgtcaagtaccacctcactgggccattcagcgccaacttgcaagtttgctctttgagttgggatgtaccagttcagcccttcagatatttgaaaagctagaaatgtgggaagatgttgtcatttgttatgaaagagccgggcagcacggaaaggcagaagaaatccttagacaagagctggagaaaaaagaaacgcctagtttatactgcttgcttggagatgtcctcggagaccattcttgctatgacaaggcctgggagttgtcccggtaccgcagtgctcgtgctcagcgctccaaagccctccttcatcttcggaacaaggagtttcaagagtgtgtagagtgcttcgaacgctcggttaagattaatcccatgcagctcggggtgtggttttctctcggttgtgcctatttggccttggaagactatcaaggttcagcaaaggcatttcagcgctgtgtgactctagaacccgataatgctgaagcttggaacaatttgtcaacttcctatatccgattaaaacaaaaagtaaaagcttttagaactttacaagaagctctcaagtgtaactatgaacactggcagatttgggaaaactacatcctcaccagcactgacgttggggaattttcagaagccattaaagcttatcaccggctcttggacttacgtgacaaatacaaagatgttcaggtccttaaaattctagtcagggcagtgattgatgggatgactgatcgaagtggagatgttgcaactggcctcaaaggaaagctgcaggagttatttggcagagtgacttcaagagtgacaaatgatggagaaatctggaggctgtatgcccacgtatatggaaatgggcagagtgaaaagcctgatgaaaatgaaaaggcattccagtgcctctcaaaggcatacaagtgtgacacccagtccaattgttgggagaaagatattacatcatttaaggaagttgttcaaagagccttaggacttgcacatgtggccataaaatgcagtaaaaacaaatccagttcccaagaagctgtacaaatgctttcttctgttcgactcaatttacggggcttgttatctaaagcaaagcaactttttacagatgtggcaactggagaaatgtccagggaattagctgatgacataacagctatggacaccttagtgacagagctccaagacctaagcaaccagtttcgaaatcagtattga

SEQ ID NO: 1413 - DNA, 2340 bp, homo sapiens
atgacaccggagtttgacgaagaggtggtttttgagaattctccactttaccaatacttacaggatctgggacacacagactttgaaatatgttcttctttgtcaccaaaaacagaaaaatgcacaacagagggacaacaaaagcctcctacaagagtcctaccaaaacaaggtatcctgttaaaagtggctgaaaccatcaaaagttggatttttttttctcagtgcaataagaaagatgacttacttcacaagttggatattggattccgactcgactcattacataccatcctgcaacaggaagtcctgttacaagaggatgtggagctgattgagctacttgatcccagtatcctgtctgcagggcaatctcaacaacaggaaaatggacaccttccaacactttgctccctggcaacccctaatatttgggatctctcaatgctatttgccttcattagcttgctcgttatgcttcccacttggtggattgtgtcttcctggctggtatggggagtgattctatttgtgtatctggtcataagagctttgagattatggaggacagccaaactacaagtgaccctaaaaaaatacagcgttcatttggaagatatggccacaaacagccgagcttttactaacctcgtgagaaaagctttacgtctcattcaagaaaccgaagtgatttccagaggatttacactggtcagtgctgcttgcccatttaataaagctggacagcatccaagtcagcatctcatcggtcttcggaaagctgtctaccgaactctaagagccaacttccaagcagcaaggctagctaccctatatatgctgaaaaactaccccctgaactctgagagtgacaatgtaaccaactacatctgtgtggtgccttttaaagagctgggccttggacttagtgaagagcagatttcagaagaggaagcacataactttacagatggcttcagcctgcctgcattgaaggttttgttccaactctgggtggcacagagttcagagttcttcagacggttagccctattactttctacagccaattcacctcctgggcccttacttactccagcacttctgcctcatcgtatcttatctgatgtgactcaaggtctacctcatgctcattctgcctgtttggaagagcttaagcgcagctatgagttctatcggtactttgaaactcagcaccagtcagtaccgcagtgtttatccaaaactcaacagaagtcaagagaactgaataatgttcacacagcagtgcgtagcttgcagctccatctgaaagcattactgaatgaggtaataattcttgaagatgaacttgaaaagcttgtttgtactaaagaaacacaagaactagtgtcagaggcttatcccatcctagaacagaaattaaagttgattcagccccacgttcaagcaagcaacaattgctgggaagaggccatttctcaggtcgacaaactgctacgaagaaatacagataaaaaaggcaagcctgaaatagcatgtgaaaacccacattgtacagtagtacctttgaagcagcctactctacacattgcagacaaagatccaatcccagaggagcaggaattagaagcttatgtagatgatatagatattgatagtgatttcagaaaggatgatttttattacttgtctcaagaagacaaagagagacagaagcgtgagcatgaagaatccaagagggtgctccaagaattaaaatctgtgctgggatttaaagcttcagaggcagaaaggcagaagtggaagcaacttctatttagtgatcatgccgtgttgaaatccttgtctcctgtagacccagtggaacccataagtaattcagaaccatcaatgaattcagatatgggaaaagtcagtaaaaatgatactgaagaggaaagtaataaatccgccacaacagacaatgaaataagtaggactgagtatttatgtgaaaactctctagaaggtaaaaataaagataattcttcaaatgaagtcttcccccaaggagcagaagaaagaatgtgttaccaatgtgagagtgaagatgaaccacaagcagatggaagtggtctgaccactgcccctccaactcccagggactcattacagccctccattaagcagaggctggcacggctacagctgtcaccagattttaccttcactgctggccttgctgcagaagtggctgctagatctctctcctttaccaccatgcaggaacagacttttggtggtgaggaggaagaacaaataatagaagaaaataaaaatgagatagaagaaaagtaa

SEQ ID NO: 1414 - DNA, 1503 bp, homo sapiens
atgattatatcacattttccaaaatgtgtggcagtttttgccctccttgctctgagtgttggtgcactggacacttttattgctgcagtatatgagcatgcggtgatattaccaaacagaacagaaacacctgtttcaaaagaagaagctttgctcctgatgaacaagaacatagatgttttggagaaagcagttaagctggcagcgaagcagggtgcacatatcattgtgaccccagaagatggaatctatggttggatcttcaccagggagagcatttacccctatctagaggatataccagaccctggagtgaactggattccatgtagagacccctggagattcggcaacacaccagtgcaacaaagactcagctgcctggccaaggacaactctatctatgtcgtggctaatattggggacaagaagccatgcaatgccagtgactctcagtgtccccctgatggccgttaccaatacaacactgatgtggtgtttgattctcagggaaaactgttggcacgctaccataagtacaatctttttgcacctgaaattcagtttgatttccccaaggattcagaacttgtgacttttgacactccctttgggaagtttggcatttttacttgctttgacattttttctcatgacccagctgtggtggtggtggatgagtcaattgacagcattctctaccccacagcatggtacaacacgctgcccctcctctcggctgttcccttccattcagcatgggccaaggccatgggagtcaatctacttgctgcaaatacccacaacaccagcatgcacatgacagggagtggaatctacgccccagaagcagtcaaggtgtaccactatgacatggaaacagagagtggtcagctgttgctatcagaactgaagtctcggccccgccgtgagcccacctaccctgcagctgttgactggcatgcgtatgccagcagtgtcaagccattttcctctgaacagtcagattttctggggatgatttattttgatgagtttaccttcaccaagcttaagagaaatacaggaaattacacagcttgccagaaagatctgtgttgtcacttaacttacaagatgtctgagaagcgaacagacgagatctatgccctaggtgcttttgatggactgcacacagtagaaggccaatattacttacagatatgtgcattactgaagtgtcaaaccactgacctggaaacgtgtggagaacctgtggggtcagcttttaccaagtttgaagacttctccctcagtggcacatttggaacgcgttatgttttcccacagatcattctaagtgggagtcagcttgcccctgaaagacattatgagatttcaagagatggacgcttgaggagccgaagtggagcccctttgcctgtcttagttatggccctgtatggaagagtgtttgagaaggaccctccacgcttagggcagggatctgggaaattccagtga

SEQ ID NO: 1415 - DNA, 9288 bp, homo sapiens
atggttttcgagtcggtggtcgtggacgtgttgaaccggttcttgggggactatgtggtggacttggacacgtcccagctctctctgggcatctggaaaggagctgtggccctcaagaatcttcaaattaaagaaaatgccctgagtcaactggatgtaccatttaaagttaaagttggtcacataggtaatcttaaacttataattccatggaaaaacctttatactcaacctgttgaagccgtattggaagaaatttatttacttatagtgccttcttctagaataaaatatgatcctttaaaagaagagaaacaactcatggaagcaaagcaacaggaactgaaaagaatagaagaagcaaaacaaaaagtagttgatcaagaacaacatctgccggaaaaacaggacacttttgcagaaaaattagttacacagatcataaaaaatcttcaggtgaaaatttccagtatccatattcgttatgaagatgatatcacaaatcgggacaaaccgctgtcatttggtatttcccttcaaaatctgagcatgcagacaactgatcaatactgggttccatgtttacatgatgaaactgagaaactggttcgtaagttaatccgattggataacctgtttgcctattggaatgtgaagtctcagatgttttatcttagtgattatgataactccttggacgacttgaagaatggcattgtcaatgaaaatattgttccagaaggttatgattttgtatttcgtcccatatctgctaatgccaaacttgtgatgaatcgccgatctgattttgacttttctgcccccaaaataaacttggaaattgagttacataacatagcaattgaatttaataaaccacagtatttcagtattatggagcttcttgaatcagttgatatgatggcacaaaatctgccatataggaagttcaaacctgatgtgcctcttcaccaccatgccagagaatggtgggcttatgctatacatggcgttcttgaagtaaatgtttgccccaggttatggatgtggtcatggaagcatattagaaaacataggcaaaaagtgaagcaatataaagaactgtataaaaaaaagttaacaagtaagaagccacctggtgaacttctcgtgtctttggaggagttggaaaaaaccttggatgtctttaatataactatagctagacagacggcagaagttgaggtaaagaaagctggatacaaaatttacaaagaaggagtaaaagatccagaggataataaagggtggtttagctggctatggtcttggtcagaacaaaatactaatgaacagcaaccagatgttcaacctgaaactcttgaagaaatgttgacacctgaagaaaaagctttactctatgaagcaattggctatagtgaaacagcagttgatccaactttactaaaaacatttgaagccttgaagttttttgtccacttgaaaagtatgtctattgttctaagagaaaatcatcaaaaacctgagctggtagatattgtaatagaagaatttagcaccttaattgtgcaaagaccaggagcacaagcaataaaatttgaaactaaaatagattcatttcatattactggcttaccagataattcagaaaaaccccgcctcctgtcttcattggatgatgcaatgtcacttttccaaattacatttgagataaatccattagatgaaactgtttctcagaggtgtatcatagaagctgaacctttagaaatcatatatgatgcaaggacagtgaatagtatagtggaattcttcagacctccaaaagaggtacatctagcacagctcactgcagcaactttgacaaaactggaagaatttcgcagtaagacagcaacaggtctactgtatattattgaaacacagaaagttcttgatctcaaaattaatttgaaggcttcatatattattgtcccacaagatggaatttttagtcctacatcaaatctgcttcttttggaccttggtcatctaaaggtgacgagtaaaagtcgttctgaattaccagatgtgaaacaaggtgaggccaatcttaaagagataatggatagagcttatgattcatttgatattcaacttacaagtgtacagctgctttacagtagagttggtgataattggagagaagcacgaaaactcagtgtatctacccagcatattttggtacccatgcacttcaatttggaactgtctaaggccatggttttcatggatgtaaggatgcccaaattcaagatttatggaaagttacctcttatttctttacgaatctcagataaaaaactacaagggattatggaattgattgaaagcattccaaaacctgaaccagtaactgaagtatctgcccctgtcaaatcattccagattcaaacatctacttctttgggaacatcacagatttcacagaaaataattcctctcttggaacttccatctgtttctgaagatgattcagaggaggaattttttgatgcaccatgtagtcccttggaagaacctcttcagtttccaactggagttaaaagtattcgaaccagaaagttacaaaagcaggattgttcagtaaatatgactacatttaaaataagatttgaagtaccaaaggttttgatcgagttttatcaccttgttggagattgtgaactatctgtggtagaaattcttgttttaggattgggtgcagaaattgagattagaacatacgatttgaaagcaaatgcctttttgaaagagttctgcttaaaatgcccagaatacttggatgaaaacaagaaaccagtttatttggttacaaccctggataacacaatggaagacctgttaacgctggaatatgtaaaggctgaaaagaatgtacccgacttgaaaagtacctataacaatgttttacaattgattaaggtaaatttttcctctttggatattcatttacacactgaagcacttctgaatacaataaattatcttcataatatccttccgcaatcagaggaaaaatcagccccagtgtccactacagagactgaagacaaaggagatgtcattaaaaaattagctttaaaactatccacaaatgaagatatcattactttgcagattttagcagaattatcgtgtttacagatctttattcaagatcagaaatgtaacatttctgaaattaagattgaagggcttgattctgagatgattatgaggccttcagaaactgaaataaacgcaaagctaaggaatataattgttttagattctgatataacagctatatacaaaaaggctgtttatatcactggaaaagaagttttcagcttcaaaatggtttcttacatggatgcaactgctggttctgcatacacagatatgaatgtggttgacattcaggttaatttaatagttggttgcattgaagtagtttttgtcacgaaatttctatattctatattggcttttatagataattttcaggcagctaaacaagccttggctgaggcaactgttcaggcagctggaatggctgctactggtgtaaaagaactcgcacaaaggagttccagaatggcactggatattaacatcaaagccccagttgtggtcatcccgcagtctccagtttctgaaaatgtttttgttgctgattttggactaattacaatgacaaatacctttcatatgataacagagagccagagctctcccccacctgttattgatttgataacaataaagctgagtgaaatgcgactatacagatctcgatttattaatgatgcataccaggaagtactggatctactcctgccattaaatcttgaggttgtggttgaacgaaatttatgctgggagtggtaccaggaagttccttgttttaatgtaaatgctcagctgaaaccaatggagttcattcttagtcaagaagatataacaactatttttaaaacattgcatggcaatatatggtatgaaaaagatggtagtgcctcacctgctgtaacaaaagaccaatacagtgccactagtggagttactactaatgcttcacaccattcaggaggagcaactgtggtgacagctgctgtggtagaagtacattcacgtgccttactagttaagacaacactaaacataagcttcaaaactgatgatctcaccatggtgctgtatagtccaggtcctaaacaggcttcctttacagatgttcgtgatccttctctgaaacttgctgaatttaaattggagaatattataagtactttaaaaatgtatacagatggctcaacattttcttccttctcattaaaaaactgtattttagatgataaaagacctcatgtcaagaaagcaactcctcgaatgataggactgacagttggttttgacaaaaaagacatgatggatataaagtacaggaaagtcagagatggttgtgtgactgatgcggtctttcaagaaatgtatatttgtgcaagcgtagaatttctgcagactgttgcaaatgtctttcttgaggcctacaccacaggcactgctgtagaaaccagtgtgcaaacatggactgctaaggaagaagtacctacacaggaatcagtgaagtgggaaattaatgttattattaaaaatcctgaaattgtgtttgtagctgacatgacaaaaaatgatgctcctgctttagtcattacaacacaatgtgaaatttgctataaaggtaaccttgaaaatagtacaatgactgctgccattaaagatctccaagtgagagcctgcccgtttcttccagtcaagagaaaaggcaaaatcactactgttttgcagccctgtgacttgttttatcaaactactcagaaaggtacagatccacaagtgatcgatatgtcagtaaaatccctgacactaaaggtttcaccagttattataaatactatgattaccataacttcagcactgtatacaactaaggaaaccatcccagaagaaacggcttcttctactgcacatttatgggaaaagaaggatacaaagactttaaaaatgtggtttcttgaagaatcaaatgaaactgaaaaaatagctcccacaactgaattggtacccaaaggcgagatgataaaaatgaacattgattctatttttatagttcttgaggctggaattggtcatagaacagtacctatgcttctggcaaagtcacgtttttcaggggaaggcaaaaactggagttccctaataaatctgcactgtcagcttgagctagaagtgcattattataatgaaatgtttggtgtatgggagcctttgcttgaacccttagaaattgatcagactgaggattttagaccatggaatcttggtatcaagatgaaaaagaaagcaaaaatggccattgttgagtcagatcctgaagaagaaaactacaaagtgccagaatataaaactgtcatcagtttccattcaaaagaccaattaaacattacattatccaaatgtggtcttgtaatgttaaacaatttagtcaaggcatttacagaagctgccactggatcttcagctgacttcgtaaaggatctagcaccatttatgattttaaattcccttggacttactatttctgtttcgccaagtgattcttttagtgtactcaacattcctatggcaaaatcatatgtattgaaaaatggagaaagtttaagtatggattatatccgaaccaaggacaatgatcatttcaatgcaatgaccagcctaagcagcaaactcttcttcattcttcttacacctgttaaccattctactgctgataagattcctttaacaaaagtgggacgacgtctgtacactgtaagacacagagagtctggcgttgaaagatctattgtttgtcaaattgatacagtagaaggaagtaagaaggtcacaattcgctccccagtgcagataagaaatcatttttcagtcccactgtctgtttacgaaggggataccttattgggaactgcctcacctgaaaatgaattcaacataccattaggatcttaccgatcattcatttttctgaagccagaagatgagaactatcaaatgtgtgaaggaattgactttgaagagattataaaaaatgatggtgctcttctaaagaagaaatgtagatctaaaaacccttctaaggaatcatttctcattaatattgttccagaaaaagataatttaacatctctatcagtgtattcagaagatggttgggatttaccatacataatgcatttgtggccacctatcctgctccgaaatcttcttccttacaaaattgcttattatatagagggaattgaaaattcggtttttactctaagtgaaggacattcagcccagatttgtactgcacagttgggtaaagccaggctacatttaaaattacttgactatctcaatcacgattggaaaagtgaatatcacataaagcctaatcagcaagacattagttttgtcagttttacttgtgttacagaaatggaaaagactgatttagatattgctgtccatatgacttacaatactggtcagacagttgtggcatttcatagtccttattggatggtcaataaaactggccgcatgttacagtacaaagcagacggaattcatcgaaagcatccacctaattataaaaagccagttctcttttcttttcagccaaatcacttttttaataacaataaggttcaacttatggtaactgatagtgagttgtccaatcagttttcaattgatactgttggtagtcatggagctgttaaatgtaaaggcctgaaaatggactatcaagttggtgtcactatagacctgagcagttttaacattactagaattgtgacatttacccctttttatatgattaaaaacaaaagcaaataccatatatcagtggctgaagaaggaaatgataaatggctctctcttgatttggagcagtgtatccccttttggcctgagtatgcttctagtaaacttcttattcaagtcgaaaggagtgaagatcctcccaaaaggatatattttaacaagcaggaaaattgtattctattgcgtctagataacgagcttggaggtattatagcagaagtgaatttggccgagcattctacagttattacatttttagattatcatgatggagcagctacattcctcttaataaatcacacaaagaatgaacttgttcaatacaatcaaagttctctcagtgaaatagaagattccctccctcctggtaaagccgtgttttatacatgggctgatccggtgggctctagaaggctgaagtggagatgtagaaaaagccatggtgaagtaacacagaaggatgatatgatgatgcctatagatttgggggaaaagacaatatatttagtttcattctttgaaggtttacaacgcattattttattcactgaagatccaagggtatttaaagtaacatatgaaagtgagaaagcagagttagcagagcaagaaattgcagtggcattacaagatgttggaatttctcttgtcaacaattacacgaagcaagaagtagcctatataggcattacaagttctgatgtggtttgggaaacaaagcccaagaagaaggcaagatggaagccaatgagtgtaaagcacactgagaagttagagagagaatttaaggaatatactgaatcttctccttcagaagataaggttattcagttggacactaatgttccggttcgcctaacccctactggtcataacatgaaaattctgcagccgcatgtaatagctctacgaagaaattatcttccagcattaaaagtggaatataacacatctgcacatcaatcatcatttagaattcagatttacagaatacagatccaaaatcagatacatggtgctgtatttccctttgtgttttatcctgttaaacctccaaagtcggtcaccatggattcagcaccaaagccctttacagatgtcagtattgtcatgagatctgcaggacattcccagatatcacgtattaagtatttcaaagtattgattcaagaaatggatctcaggttagatcttgggtttatctatgctttaacagaccttatgacagaagctgaggtgactgaaaatacagaggttgagctttttcataaagatatagaagctttcaaagaagaatataaaacagcctcattagtagatcaatcacaagtcagcctctatgaatattttcatatatctcctatcaagttacatttaagtgtttcactgagttccggcagagaagaagctaaagattcaaaacaaaatggaggactgattccagttcattctttaaatcttttgctgaagagtattggtgccacactgacagatgtacaagatgtagtttttaagcttgcattttttgaactcaactatcagttccatacaacatccgatctacagtctgaagtcataagacactattcaaaacaggccattaagcagatgtatgtactcattcttggacttgatgttttgggaaatccatttggcttaattagagaattttctgaaggtgtagaagcatttttttatgaaccttaccagggagccatccagggtcctgaagagtttgtggaaggaatggcactaggacttaaggcactagttggtggagctgttggtggattggctggtgctgcctccaaaatcaccggtgctatggctaagggggtagcagctatgaccatggatgaagactaccaacagaagagaagagaagccatgaataagcaaccagctggttttagagaaggcatcactcgtggaggaaaaggcttagtttctggatttgttagtggcataacaggaattgttacaaaaccaatcaaaggagctcaaaaaggaggagcagctggtttctttaaaggtgttgggaaaggtttagtaggagcggtagcaaggccaactggaggcatcatagacatggctagcagtacatttcagggaataaaaagagctacagagacttctgaagtggagagtctgcgacctcctcggttcttcaatgaagatggagttatcagaccgtacaggttgagggatgggactggaaatcaaatgttacagaaaattcaattctacagggagtggattatgactcacagtagcagtagtgatgatgatgatgatgatgatgatgatgatgagtcagatctaaaccattaa

SEQ ID NO: 1416 - DNA, 2592 bp, homo sapiens
atgctggagtcatatgtaactccaattttaatgagctatgtgaatcgctacatcaagaacttaaagccgtcggatctacagctttcactatggggtggagacgtggtactcagcaagctcgagttaaagttggatgtgctggaacaggaactgaaattaccattcacttttttaagtggacatattcatgaattgaggattcatgtaccatggacaaaactgggttcagaaccagtggtaattaccatcaatactatggaatgcattttgaaacttaaggatgggatacaggatgaccatgaaagctgtggttctaattctaccaaccgtagtactgctgagagcacaaaatcatcaatcaaaccgcggagaatgcagcaggctgctcctacagatcctgacttaccaccaggttatgtgcagagtctgattagacgagttgtaaataatgtaaacattgtgataaataatctcatactaaaatatgttgaagatgatatcgtcctttccgtcaatatcacttctgcagaatgttatacagtaggtgaattatgggatcgtgcattcatggatatttctgcaactgatttggtgctgagaaaggttatcaatttttctgactgtacagtttgtcttgataaacggaatgccagtggtaaaatagaattttaccaggatcctttattatacaaatgttccttcagaactcgtcttcattttacatatgaaaacctaaattccaagatgccatctgttattaaaattcatactttagtggaaagtttgaaactttctatcacagatcaacaactgcctatgtttattcgtataatgcaacttggaattgctctttactatggagaaataggcaattttaaagaaggcgaaatagaggaccttacttgtcataataaagatatgctaggaaacattacaggttctgaagatgaaacaagaatagatatgcaatatcctgctcagcataaaggtcaagagttatattcacagcaagatgaggagcagccacagggatgggtgtcatgggcctggtcctttgtgcctgcaattgtgagttatgacgatggcgaggaagactttgttgggaacgatcctgcatcaaccatgcatcaacaaaaagcacagactttgaaggatcctattgtttctataggattttattgcacaaaggcaacggtgactttcaaactcacagaaatgcaagttgagagtagttattacagtccacagaaagtaaaatctaaagaagtattgtgttgggaacaagaaggaactacagttgaggcccttatgatgggagaacctttctttgattgccagattgggtttgttggttgcagagccatgtgccttaaaggaattatgggtgttaaagattttgaagagaatatgaatagaagtgaaactgaagcctgtttcttcatttgtggtgacaatttgagtacgaaaggtttcacataccttacaaattcattgtttgattaccgaagcccagaaaataatggtactcgcgcagaatttatcttggattcaactcatcataaggagacatacactgagatagctggaatgcaacggtttggggctttttatatggattacctgtatacaatggagaacactagtggcaaaggttccacaaatcaacaagacttttcttcagggaaaagtgaagatttgggaacagttcaggagaagtccaccaaaagccttgttataggtcctcttgattttcgtttggatagcagtgcggtgcataggattttgaaaatgattgtgtgtgccttggaacatgaatatgaaccatatagcaggctaaaatcagatattaaggatgaaaatgaaacaatactgaatcctgaagaggtggctcttctggaggaatatattcctactcgacatacaagtgttactctcctcaaatgtacctgcacaatttccatggctgaattcaacttgctggaccatttactacctgtcattatgggagaaaagaactcaagtaacttcatgaatactacaaacttccagtctcttcggcctttgccatccattcgaatattggtggataaaattaatctggaacattcagtgccaatgtatgctgaacagttggtgcatgtggtcagcagccttactcaaccttctgataacctgcttcattattgttatgtacactgctatcttaagatatttggtttccaggcaggactgacgtctttggattgcagtggatcttactgcttacctgtaccagttattccctctttcagcactgctctttatgggaaacttctgaaactccccacatgctggaccaaaagatctcagattgctataactgaaggtatatttgaacttccaaatctcacaattcaagctacaagagcacagacacttctcttgcaagcaatatatcaaagttggtctcatcttggaaatgtcagctcttccgcagtgattgaagctttgataaatgaaatcttcctaagtatagagattgggtcttgctatgttgcccaggttgatcttgaactcctggcctcaaatgatcctcccacctcaacctcctga

SEQ ID NO: 1417 - DNA, 11133 bp, homo sapiens
atggtgctggagtcggtggtcgcggacttgctgaaccgcttcctgggggactatgtggagaacctgaacaagtcccagctgaagctgggcatctggggcggaaatgtggctttagataatctacagataaaagaaaatgccctgagtgaattggatgttccttttaaagtcaaggctggccaaattgataaattaactttgaagattccttggaagaacctttatggagaagcagttgttgcgaccctggaaggattatacctgcttgttgtccctggagcaagtattaagtatgatgctgtaaaagaagaaaaatccttgcaggatgttaaacagaaagagctatcccgaattgaagaagcccttcaaaaagcagcagaaaaagataagccaaaagaagccaaaaaggatacatttgtggaaaaattggcaactcaagtaataaaaaatgtacaagtaaaaatcacagatattcacattaaatatgaagatgatgtcactgatccaaagcggcctctttcatttggtgtcacactgggagagcttagtctactgactgcaaatgaacactggactccatgcatattaaatgaagcagacaaaattatatacaagcttatacgacttgatagtcttagcgcctactggaatgtaaattgcagcatgtcttaccagagatcaagggaacagattttggatcagctgaaaaatgaaattcttacaagtggaaatatacccccaaattatcaatacattttccagccaatatcagcctctgcaaaactctacatgaatccttatgcagaatcagagctcaaaacgcccaaactggattgcaacatagaaatacaaaatattgccattgaactgaccaaacctcagtacttaagtatgattgaccttttggagtcagtggattatatggttaggaatgcgccttataggaaatacaagccttatttaccacttcataccaatggtcgacgatggtggaaatatgcaattgattctgttcttgaagttcatataagaaggtatacacagatgtggtcatggagtaacataaaaaagcacaggcagttactcaagagttataaaattgcctacaaaaacaagttaacacagtctaaagtctcagaagaaatacagaaagaaattcaggacttggagaagactctagatgtttttaacataattttagcaaggcaacaagcacaagttgaggtgattcggtctgggcaaaaattaaggaaaaagtctgctgacacaggcgagaaacgtggaggctggtttagtgggttgtggggtaagaaagagtctaagaaaaaggacgaagaatcattgattcctgaaactattgatgaccttatgactccagaggaaaaagataaactcttcactgccattggttatagtgagagtacccacaacctaactttacctaagcagtatgttgcccatattatgaccctgaagttagtaagcacctctgttacgataagagaaaacaagaatattccagaaatactaaaaattcagataattggcctgggcactcaagtatctcagcgaccaggagcacaagcacttaaggtagaagcgaaattagaacactggtatataacaggtttgagacagcaggatattgtgccatcacttgtggcttcaattggtgacactacatcatccttgcttaaaattaaatttgaaaccaatccggaggatagtcctgctgaccagactctgattgttcagtcccagcctgtggaggtcatctatgatgctaaaactgtcaatgcagtggttgaattctttcaatcaaataagggattggatcttgagcaaataacatcagcaacattgatgaagctggaagaaattaaggagagaacagctacaggacttacacatattattgaaactcgaaaagtccttgatttaaggataaatctgaagccttcttatctagtagttccacagacgggtttccaccatgaaaagtcagatcttctgattttagattttggtacatttcagctcaacagtaaagatcaaggtttacagaagactactaattcatctctggaagaaataatggataaggcatatgacaagtttgatgttgaaataaaaaatgtacaactactttttgcaagagcagaggaaacctggaaaaagtgtcgatttcagcatccatcaactatgcatatattgcaacccatggatattcatgttgagttggctaaggccatggtagaaaaagacattagaatggccagatttaaagtgtcaggaggacttcctttgatgcatgtgagaatttctgaccagaagatgaaagatgtgctatatttgatgaacagtatacctttgccacagaaatcatcagcccagtctccagagagacaggtatcctcaattcctattatttcaggtggtacaaaaggtctacttggtacttcactattgctagacactgtggaatcagagtctgatgatgagtattttgatgctgaagatggagaaccacagacttgtaaaagtatgaaaggatcagaacttaaaaaagctgcagaggtcccaaatgaggagctcatcaatcttctactcaagtttgaaattaaagaagtgattttggaatttactaaacagcagaaagaagaagatacaattctagtatttaatgttactcagttaggaacagaggccacaatgagaacatttgacttaactgtggtatcttatttaaagaaaatcagcttggattatcatgaaattgaaggatccaaaaggaagccccttcacttgattagctcttctgacaaacctggattagatcttttgaaagtggagtatattaaggctgataagaatggacctagttttcaaactgcttttggaaaaactgaacaaacagttaaggtggccttttcatctttaaatctgttgctgcaaacacaagctcttgtcgcttctattaattacctcacaaccattattccatctgatgatcaaagcataagtgttgctaaggaggtacaaatttcaactgaaaaacaacaaaaaaattcaactctgccaaaagcgattgtatcctccagagatagtgacattattgatttcaggctatttgccaagttgaatgctttctgtgtcattgtttgcaacgaaaagaacaatatcgccgaaatcaagattcaaggactggattcctccctttctctccagtcaagaaagcagtcactttttgcccgactagaaaatattattgtcacagatgttgatccaaagacagttcataagaaagctgtgtcaataatgggaaatgaagttttccgttttaatttggatttgtatccagatgctactgagggggatttgtatactgacatgtccaaagtggatggtgtgctgtctctgaatgttggctgtattcagattgtctatcttcataaattccttatgtcacttctgaacttcctgaataatttccagacagccaaagagtctctgagtgctgccactgcccaggctgcagaaagggctgccacaagtgtgaaagatcttgcccagaggagttttcgtgtttccatcaatattgatttgaaagcaccggttatagtcatcccacagtcttctatttccaccaatgcagtagtggtagatcttgggttaatcagagttcataatcagttcagtctggtgtctgatgaagactacttaaatcctccagtaattgatagaatggatgtgcagctaacaaagcttacactttataggacagtgatccagccaggcatctaccatcctgatattcagctgttgcacccaattaacttggaatttcttgtaaatcggaatctagctgcatcttggtaccacaaggtgcctgttgtggaaattaaaggacatcttgattcaatgaatgttagtctaaatcaagaagatcttaatcttttatttaggatactaacagaaaatctctgtgagggtactgaagacttggataaagtgaaaccaagagtacaagagacaggtgaaattaaagagccccttgaaatctctatatcacaagatgtacatgattcaaaaaatactttaacaactggagtggaagaaattaggtctgtagacatcattaatatgctgctgaattttgaaattaaagaggttgtggttactttgatgaaaaaatcagaaaagaaaggaaggcctttacatgagctaaatgtcctgcaacttggaatggaagctaaagttaaaacctatgacatgactgctaaagcttatctaaaaaaaattagtatgcagtgctttgatttcactgactctaaaggggaacctcttcacattattaactcttctaatgtgactgacgaaccccttctgaaaatgttactgacaaaggcagacagtgatggaccagaatttaaaactattcatgacagtaccaaacagagactgaaggtttcatttgcatccttagacttagtacttcatttggaagctttactttccttcatggattttttatcatctgctgctccattctctgagccttcctcttctgagaaggaatccgagctgaaaccacttgtgggggagtccagaagtatcgctgtcaaagctgtatccagcaacatttcccaaaaggatgtgtttgatttaaagatcacagctgaattaaatgcatttaatgtctttgtctgtgatcagaagtgtaacattgcagatattaaaatacatggaatggatgcctctatttctgtgaagcctaagcagactgatgtgtttgccagacttaaagatattatagttatgaatgtagatttgcagtccattcacaaaaaggctgtctctattttgggagatgaagtctttaggttccaactgactctttatccagatgccacagaaggagaggcctatgctgatatgtccaaagtagacggcaaacttagttttaaagtgggttgtattcagattgtttatgttcataaattcttcatgtctcttttgaacttcctcaacaatttccaaactgctaaagaagctttgagtacagccacagtccaggctgcagaaagagctgcttccagcatgaaagacttggctcaaaagagtttccgccttttgatggatattaatttgaaagcaccagttattattattcctcagtcttcagtatcacctaatgctgttatagcagatctgggtttaatcagagttgaaaacaagtttagcttggttcctatggaacattattctcttcctccagtcattgataaaatgaacatcgaactcactcagttgaagctgtcaagaactattttgcaggctagcttgccacaaaatgacattgaaattttaaaaccagtcaacatgcttttgtccatacagcgaaacttagcagcagcatggtatgtgcaaattccagggatggagataaaaggaaaactaaaacctatgcaggttgctctcagtgaagatgacttgacagttttaatgaaaattttgctagaaaatcttggagaagcttcctcacaaccaagccctacacagtctgtgcaggagactgtaagagtgagaaaagttgatgtttcaagtgtacctgaccatctcaaagaacaagaagattggacagactcaaagctctctatgaaccagattgtcagtctccaatttgactttcactttgaatctctttccattatcctttataacaatgatatcaaccaggaatctggagttgcatttcataatgacagtttccaacttggtgaactcagactacatcttatggcctcctcagggaagatgtttaaggatggctcaatgaatgtcagcgttaaacttaagacatgcacccttgatgatctcagagaaggaattgagagagcaacatcgagaatgattgacagaaagaatgaccaagataacaacagttctatgattgatataagttacaaacaagacaaaaatggaagtcaaattgatgctgttcttgacaagctgtatgtatgtgccagtgtggaatttctgatgactgtggcagatttctttatcaaagctgtgcctcagagtccagaaaatgtggcaaaagaaacacagattttaccaagacagactgccacagggaaggtcaagatagagaaagatgactctgttagaccaaatatgactttaaaggccatgatcacagatccagaagtggtatttgttgccagcctgacaaaggctgatgctcctgctctgacagcctcgtttcagtgcaacctttctctgtcaacatccaaactcgaacagatgatggaagcttctgtgagagatctgaaagtgctcgcttgcccttttctcagagaaaagagagggaaaaacattaccacagtcttgcagccctgttctttatttatggaaaaatgtacgtgggcttcaggaaagcaaaatataaatattatggttaaagaatttataattaagatttcacccataattcttaatactgtgttgacaatcatggctgcattgtctccaaaaacaaaagaagatggatccaaagatacgtctaaggaaatggaaaatctttggggtatcaaatcgattaatgattataacacttggtttcttggtgttgacacggcaacagaaataacggaaagcttcaaaggcattgaacattcactgatagaggaaaattgtggtgttgttgtagaatccattcaagttaccttagaatgtggccttggacatcgaactgtacctttattattggcagagtctaagttttcaggaaatattaaaaattggacttctctaatggctgctgttgctgacgtgacactacaggtgcactattacaatgagatccatgctgtctgggagccactgattgagagagtggaggggaagagacaatggaatttaaggcttgatgtaaagaagaacccagttcaggataaaagtttgctgccaggagatgattttattcctgagccacaaatggcaattcatatttcttcaggaaatacaatgaatataacaatatccaaaagttgtcttaatgttttcaacaatttagcaaaaggtttttcagagggcactgcttctacttttgactactctttaaaggacagagctccttttacggtaaaaaatgctgtaggtgttcccattaaggtgaagcccaattgtaatctcagagtaatgggcttccctgagaaaagtgatatttttgatgttgatgctggccagaatttggaactggagtatgccagcatggtaccttcaagtcaagggaacctatctatattgagccgtcaagaaagctccttcttcactctgaccattgtacctcatggatatacagaagttgcaaatatccctgtggccagacctggacggcgattgtataatgtacggaatcccaatgccagtcattctgactctgtcttggtacaaattgatgcaactgaagggaataaagtaattacccttcgctctcctctacagatcaaaaaccatttctccattgcatttatcatctataaatttgttaagaatgttaagctattggagcgcattgggatagccagacctgaagaggagttccatgttcctttagattcatatagatgtcaattgtttatccagccagctggaatcttagagcatcagtacaaagaatctaccacttatatttcctggaaggaagaacttcataggagcagggaagtcagatgcatgttgcagtgtccatcagtagaagtcagcttcttacctctcatagtgaatacagttgctctgcctgatgaattgagctacatatgtacacatggggaagactgggatgtagcttacattattcatctttatccttctctcactttgcggaatcttctcccatattccctaagatatttacttgagggaacagcagaaactcatgagctggcagaaggcagtactgctgatgttctgcattcgagaatcagtggtgaaataatggaattagtcctggtgaaataccagggcaaaaactggaatggacatttccgcatacgtgatacactaccagaattctttcctgtgtgtttttcttctgactccacagaagtgacgacagtcgacctgtcagtccacgtcaggagaattggcagccggatggtgctgtctgtctttagtccctattggttaatcaacaagactacccgggttctccagtatcgttcagaagatattcatgtgaaacatccagctgatttcagggatattattttattttctttcaagaagaagaacatttttactaaaaataaggtacaattaaaaatttcaaccagtgcctggtccagtagtttctcattggatacagtgggaagttatgggtgtgtgaagtgtcctgccaacaatatggagtacctggttggtgttagcatcaaaatgagcagtttcaacctttcacgaatagttaccctgactcccttttgtaccattgcaaacaagtcatcattagaactagaagttggcgagattgcatctgatggctcaatgccaactaataaatggaactatattgcttcttcagagtgccttccattttggccagaaagtttgtcaggcaaactttgtgtgagagtggtgggctgtgaaggatcttccaaaccattcttttataaccgacaggataatggcactttattgagcttagaagatctgaatgggggtatcttggtggatgtaaacactgccgaacattcaactgtcataactttttctgattaccatgagggatctgcacctgccttgataatgaaccatacaccatgggacatcctcacatacaaacagagtgggtcaccagaagaaatggtcttgctgccaagacaggctcgactttttgcctgggcagatcctactggtaccagaaaacttacatggacatatgcagcaaatgttggggaacatgatctgttaaaggatggatgtggacagtttccatatgatgcaaacatccagatacactgggtatcatttctggatgggcgccagagagttttgcttttcaccgatgatgttgccttggtttccaaagcactgcaggcagaagaaatggaacaggctgattatgaaataaccttgtctctccacagtcttgggctttcactggttaacaatgaaagcaagcaggaagtttcctatattgggataaccagttctggtgttgtttgggaggtgaaaccaaagcagaaatggaagccatttagtcaaaagcagataatcttattggaacaatcctatcagaaacatcaaatatcaagagaccatggctggattaagctagataataattttgaggtcaattttgataaagatccaatggaaatgcgcctccctattcgtagccctattaaacgagactttttatcaggaattcagattgaatttaagcagtcttctcaccagagaagtttaagggccaggttgtactggcttcaggttgataatcagttaccaggtgcaatgttccctgttgtatttcatcctgttgcccctccaaaatctattgctttagattcagagcccaagcctttcattgatgtgagtgtcatcacaagatttaatgagtacagtaaagtcttacagttcaagtattttatggtcctcattcaggaaatggccttaaaaattgatcaagggtttctaggagctattattgcactgtttaccccaacaacagaccctgaagctgaaagaagacggacaaagttaatccaacaagatattgatgctctaaatgcagaattaatggagacttcaatgactgatatgtcaattcttagtttctttgaacatttccatatttctcctgtgaagttgcatttgagtttgtctttgggttccggaggtgaagaatcagacaaagaaaaacaggaaatgtttgcagttcattctgtcaacttgctgttgaaaagcataggtgctactctgactgatgtggatgaccttatattcaaacttgcttattatgaaattcgatatcagttctacaagagagatcagcttatatggagtgttgttaggcattacagtgaacagttcttgaaacagatgtatgtccttgtattggggttagatgtacttggaaacccatttggattaattagaggtctgtctgaaggagttgaagctttattctatgaacccttccagggtgctgttcaaggccctgaagaatttgcagaggggttagtgattggagtgagaagcctctttggacacacagtaggtggtgcagcaggagttgtatctcgaatcaccggttctgttgggaaaggtttggcagcaattacaatggacaaggaatatcagcaaaaaagaagagaagagttgagtcgacagcccagagattttggagacagcctggccagaggaggaaagggctttctgcgaggagttgttggtggagtgactggaataataacaaaacctgtggaaggtgccaaaaaggaaggagctgctggattctttaaaggaattggaaaagggcttgtgggtgctgtggcccgtccaactggtggaatcgtagatatggccagtagtaccttccaaggcattcagagggcagcagaatcaactgaggaagtatctagcctccgtccccctcgcctgatccatgaagatggcatcattcgtccttatgacagacaggaatctgagggctctgacttacttgagaatcatatcaaaaagttggaaggagagacttaccgataccactgtgctattcctggaagcaagaagacaatccttatggttacaaataggcgagtgttgtgtataaaggaagttgaaatcctgggccttatgtgtgtagactggcaatgtccatttgaagattttgtatttcctcctagtgtcagtgaaaatgtgctaaaaatttcagttaaggaacagggtctgttccacaaaaaagacagtgccaatcaaggctgtgttcgaaaagtttacctgaaggacaccgccacagcagagagagcatgtaatgccattgaggatgcacagtcaacgagacagcagcaaaaattgatgaagcagtcatcagtgagacttctcagaccccaattgccatcttaa

SEQ ID NO: 1418 - DNA, 1965 bp, homo sapiens
atggagcgctctgggcccagcgaagtgacaggctcagacgcgtcgggaccggacccgcagcttgcggtcaccatgggcttcacggggttcggtaaaaaagctcgcacatttgacttggaagcaatgtttgaacaaactcgaaggacagctgtggaaagaagtcgcaaaacactggaagcaagagaaaaagaggaagaaatgaacagagagaaagaattaagaagacaaaatgaagatattgagccaacatcctcaagatcaaatgtggtcagagattgctccaaatcatcttccagggatacgagcagcagtgaaagtgaacagagttctgactcttctgatgatgagttaattggccctcctttaccccctaaaatggtaggaaaaccagttaattttatggaggaagatatcctcggtcctttacctccacctcttaatgaagaagaagaagaagcagaggaagaagaagaggaagaggaggaagaggaaaatcctgttcacaagattcctgactcgcatgagataacgctgaagcatggcactaaaacagtgtctgctttgggtctggatccctcaggtgcccgtttggtgacaggaggatatgactatgatgttaagttttgggattttgctggaatggatgcttcttttaaggcatttcgatcccttcagccctgtgagtgccatcagatcaagtcattacagtatagtaacacaggagacatgattcttgttgtatctggaagctctcaggccaaggtgattgacagagatggttttgaagtaatggaatgtataaaaggagaccagtatattgtggacatggccaacaccaagggtcatacagcaatgcttcatactggctcatggcatcccaaaataaagggagaatttatgacttgctcaaatgatgcgactgtgaggacgtgggaagttgaaaatccaaagaagcaaaaaagtgtgtttaaaccacggacgatgcaaggcaaaaaagtcattcccactacgtgcacatatagtagagatggaaacctcatagcagctgcctgccagaatggaagcatacagatctgggaccgaaatttgactgttcatcctaagttccactataaacaggctcatgactcgggcacagacacttcttgcgtgactttttcctatgatggtaatgtccttgcctctcgtggaggtgacgattcattaaaattatgggacatccgacaatttaataaaccacttttttcagcctcgggtcttcccaccatgttcccaatgactgactgctgtttcagtccagatgataagctcatagtcactggtacatctattcaaagaggatgtggcagcggcaaacttgttttctttgagcgtaggactttccaaagggtgtatgaaatagacatcacagatgcgagtgttgttcgctgcctgtggcatccaaagctgaaccagatcatggttggaactggaaatggattggctaaagtctattacgaccccaacaagagtcagaggggagcaaaattatgtgtggttaaaacccagcggaaggcaaaacaagctgagactctaactcaggactacatcatcacccctcatgccttgcctatgttccgtgagccccgccaacggagtacaaggaaacagctggagaaggacagactggatcccctgaagtcgcataaacctgaacctcctgtagcaggcccaggtcgtggtggccgagttggaacccacgggggcactctctcttcctatattgtgaagaacattgctttggacaagaccgatgacagtaatcctcgggaagccattttgcgtcatgccaaagcagcagaagacagcccatattgggtttctccagcatattccaagactcagcccaaaaccatgtttgcccaagttgaatctgatgatgaggaagcaaagaatgagccagaatggaaaaaacgtaaaatttga

SEQ ID NO: 1419 - DNA, 3456 bp, homo sapiens
atgatggcggcggcgctggggcccccagaagtgatcgctcagctggagaacgcggctaaagttctgatggcaccaccttccatggtcaataatgaacaacgccagcatgcagagcacatattcttatcatttaggaaatcaaaatcaccatttgcagtttgcaagcatattttggaaactagtaaagtggactatgtcctctttcaagctgccacagccataatggaagcagttgtccgagagtggattctcttggaaaaaggtagcatcgagtctctgcgaacattccttttaacctatgtcttacaaaggcccaaccttcaaaagtatgttcgggaacagattctactagcagtagcagtaattgtaaaaagaggatcattagataaatcaattgactgcaaaagcatttttcatgaagtcagccagttgattagtagtggcaatcccactgtgcaaactctggcctgttctattctgactgcgctattgagtgaattttcaagttcaagtaaaactagcaacattggattgagcatggaattccatggtaactgcaaaagagtttttcaggaagaagaccttcgtcagatcttcatgttaactgttgaagttctgcaggagttcagcaggcgggaaaacctcaatgctcagatgtcttcagtatttcagcgttaccttgcactcgccaatcaagtcttgagctggaactttcttcctccaaatttgggcagacattatatagctatgtttgaatcctcgcaaaatgtgctgttgaagccaacagagtcctggcgggagactcttctggacagcagagttatggagcttttcttcacagtacatcgaaaaatcagagaagattcagatatggcacaagattctctgcagtgccttgcccagttagcttctcttcatggacccatcttcccagatgaaggatcacaagttgattatctagcacacttcattgagggattactgaatactatcaatggaattgaaatagaagattctgaagctgtggggatctccagcattatcagcaacctgataaccgtgttcccacgaaatgttttaactgccattccaagtgaacttttctcctcctttgttaactgcctcacacacctcacttgttcttttgggcgaagtgctgcattggaagaagtgcttgataaagatgacatggtatacatggaagcatatgataaattgttggagtcctggttaactttggttcaagatgacaaacatttccataaaggcttttttacccaacatgcagttcaagttttcaattcctatattcagtgccacctagctgctccagatggcacaagaaatttgactgccaatggtgtggcctctcgtgaggaggaagaaataagtgaacttcaagaggatgatcgagaccagttttctgatcaactggccagtgtaggaatgctaggaagaattgctgcagaacactgtatacctcttctgacaagtttattagaagaaagagtaacaagactccatggtcagttacaacgacatcagcaacagttacttgcttcaccgggttcaagcactgttgacaacaaaatgcttgatgatctctatgaagatattcactggcttattttagttacaggctacctcttagctgatgatactcagggagagactccgctaatacctccagaaataatggaatattccattaagcattcatctgaagttgacattaatacaacacttcaaattttgggatctccaggagaaaaggcttcttccatcccagggtacaacagaacagattctgtgattaggctgttgtctgccattctcagagtttcagaagttgaatctcgagcaataagagcagatctcactcatctactaagtccccagatgggcaaagatattgtttggtttttaaaacgctgggcaaagacttatctcctggtggatgaaaaactgtatgatcagataagtctgccattcagtacagcgttcggagcagatacagagggttctcagtggataattggctacctcttacaaaaagtcatcagtaacctctcagtctggagtagtgagcaggaccttgcaaatgacactgtgcagctccttgtcactttggtggaaagaagagaaagggcaaacttagtaattcaatgtgagaactggtggaatttagctaagcagtttgcaagccgaagcccacctcttaatttcttgtcaagtcctgtgcagaggacattgatgaaggctctagtcttaggaggttttgcacatatggacacagaaaccaaacagcagtattggacagaggttcttcagccacttcagcagcgattcttaagagtgataaaccaagaaaacttccagcagatgtgtcagcaagaggaagtcaagcaggaaatcactgccacactagaggccctgtgtggcattgctgaggctacccagattgacaacgtagcaatcctgtttaattttttaatggacttccttaccaattgcattggattgatggaagtttacaagaataccccagagactgtcaatctcattatagaagtttttgttgaagttgcacataaacagatatgctatcttggagagtccaaagctatgaacttatatgaagcctgccttactttgttgcaagtgtattctaagaataatttagggcggcaaagaatagatgttacagcagaagaagagcaataccaagacctgcttctcattatggaacttcttactaacctgctgtcaaaagaattcatagatttcagtgatacagatgaagtgtttagaggacatgagccaggtcaagcagcaaacagatctgtgtcagcagcggatgttgtgttgtatggagtaaacctaattctgcccttgatgtcacaggatctcttgaagtttccaaccctttgtaatcagtactacaaattaatcacatttatctgtgagatttttcctgaaaaaataccacagcttcctgaggatctgtttaaaagtctgatgtactccctagaattaggaatgacatcaatgagttcggaggtttgccagctttgcctggaggccttgacaccgttagctgaacagtgtgcaaaagcacaagaaacagactcaccactttttctagcaacacggcactttcttaagctggtttttgatatgctggttttgcaaaagcacaacacagagatgaccactgcggctggcgaagctttctacacgttggtgtgtttgcaccaggctgaatattctgaactggtcgaaacattactatcaagtcagcaagacccagttatttaccagagattagcagatgccttcaacaagctcactgcaagcagcactcctcctacgctggatcggaagcagaagatggccttcttaaagagtttagaagaatttatggcaaatgttggtggtctcctttgtgtaaaataa

SEQ ID NO: 1420 - DNA, 684 bp, homo sapiens
atgttcaagagaatggccgaatttgggcctgactccggcgggagagtaaagggtgttactatcgttaaaccaatagtttacggtaatgttgctcggtattttggaaagaaaagagaagaagatgggcacactcatcagtggacagtatatgtgaaaccatatagaaatgaggatatgtcagcatatgtgaagaaaatccagtttaaattacatgaaagctatggcaatcctttaagagttgttactaaacctccatatgaaattactgaaacaggatggggtgaattcgaaataatcatcaaaatatttttcattgaccctaatgaaagacctgtaaccctgtatcatttgctaaagctgtttcaatcagacaccaatgcaatgctggggaaaaagacagtggtttcagagttctatgatgaaatgatatttcaagacccaacagcaatgatgcaacaattattgacaacatctcgtcagctaacattaggagcctataagcatgaaacagaatttgcagagcttgaagtgaaaaccagagaaaaattagaagctgctaagaaaaaaacaagctttgagattgcagagcttaaggagagattaaaagcaagtcgtgaaactataaattgtttaaaaaatgaaatcagaaaacttgaagaagatgaccaagcaaaagacatataa

SEQ ID NO: 1421 - DNA, 4293 bp, homo sapiens
atgtccaggccgagcagcgtctccccgcggcagccggctcctggcggtggcggaggcggcggcccctcgccttgtggccctgggggcggcggccgggccaaggggctgaaggacattcgcattgatgaggaggtgaagatcgcagtcaatatcgcgctggagcgcttccgatacggggaccagagagaaatggaatttccttcttctttgaccagtactgaaagagcctttattcatcgactcagtcagtctcttggtttggtctctaaaagtaaaggaaagggagcaaatagatacctaactgtgaagaagaaagatggatcagaaacagctcatgcaatgatgacctgtaatttgactcataatacaaaacatgctgttaggagcctaattcaaagatttcctgtcaccaataaagagcgtacagaacttctgcctaaaacagaaagaggaaatgtgtttgcagttgaagctgaaaaccgggaaatgagcaagacaagtgggcgactcaacaatggcatacctcagattccagtgaaaagaggagaatccgaatttgattcttttaggcagtctttaccagtgtttgagaaacaggaagaaattgttaaaataattaaggaaaataaagtagttttgattgtaggagaaactgggtctggaaagaccacacagattcctcagttccttttagatgattgctttaaaaatggtatcccctgccgtatattttgtactcaaccaagacgattggcagctatcgctgtggctgaaagagttgccgcagagagacgggaaaggattggtcaaacaattggttatcagatccgattagaaagcagggtttctccaaagacacttctgacattttgtactaatggggtattgcttcgtacattgatggcaggagatagtacgttgtcgactgtgacacatgttatcgtggatgaagtgcatgaaagggatcgatttagtgattttttacttacaaagttaagagatttgttgcaaaagcacccaactttgaaactaattctttctagtgctgccttggatgtaaatctctttataagatattttggaagttgtccagtgatatatatacagggaagaccatttgaagtaaaagaaatgtttctggaagatattttaagaacaactggatatacaaacaaagaaatgttaaaatataaaaaggaaaaacagcaagaagagaaacaacaaaccacacttacagaatggtactcagctcaagaaaatagtttcaagcctgaatctcagaggcagagaactgttctaaatgtgactgatgagtatgacttactggatgatggtggtgatgctgtcttcagtcagctgactgaaaaagatgtgaattgccttgaaccatggttaataaaggaaatggatgcttgcctttctgatatatggctacataaagatattgatgcctttgctcaggtctttcatctcattttaactgaaaatgttagtgttgattacagacatagtgaaaccagtgcaacagctctgatggttgctgcaggacgtggctttgcaagtcaagtagaacagttaatcagtatgggagccaatgtccatagtaaagcatcaaatggctggatggcattggattgggctaaacactttgggcagactgaaattgtggatcttctagaatcttacagtgctacactggaatttggaaatctagatgaaagttctctggttcaaacaaatggaagtgacctcagtgctgaagacagagagctcctgaaagcttatcatcatagtttcgatgatgaaaaagtagacttggatttgatcatgcatcttctatacaatatctgccatagttgtgatgctggtgcagtactaatttttctgcctggatatgacgaaattgttggactgagagatcgcatcctgtttgatgacaagcggtttgctgacagtacacatagataccaagtctttatgcttcattcaaatatgcaaacatccgatcaaaagaaagtattaaaaaacccacctgcaggtgttcgaaaaataattctttccaccaatattgctgaaaccagcatcacagtcaatgatgttgtctttgttattgattctggtaaggtgaaagagaaatcctttgatgctctgaattttgttacaatgttaaaaatggtatggatttccaaagctagtgccatacagcggaaaggcagggcagggcgatgtagacctggaatttgttttcgtctgttcagtagactccgattccagaatatgttggaatttcagactccggaacttttgagaatgccattacaggaactttgcttacataccaagctgttagccccagttaattgtcccattgctgattttcttatgaaagctcctgaacctccaccagctttaattgtaagaaatgctgtacaaatgcttaagacaatagatgcaatggatacatgggaagatctgactgaacttgggtatcatttggctgacttgccagtagaaccacatcttggtaaaatggtcttgtgtgctgttgttttaaagtgtctggaccccatccttacaattgcttgcacactagcttatcgagatccttttgtactacctactcaggcctctcaaaaacgtgcagctatgctttgtaggaaacgttttactgcaggagctttcagtgaccatatggcacttctcagagcattccaggcctggcaaaaagcacgaagtgatgggtgggagcgagccttttgtgaaaagaattttctttcacaggctactatggaaataatcataggcatgagaacacagttgcttggtcaacttagagcatcaggttttgttagagcacgaggtggtggtgacattcgggacgttaacacaaactctgagaattgggctgtcgttaaagctgcattggtggcaggcatgtatcctaatttagtccacgtggacagagagaatctagtgttgacagggccaaaggagaaaaaagtacgatttcatcctgcttcagttctcagtcagcctcaatataaaaagattcctccagccaatggtcaagctgcagcaattaaggcactgcccacagattggcttatttatgatgaaatgaccagagcccatagaatagctaatattagatgttgttcagcagtgacgcctgtcactatattggtattctgtggaccagctagattggcaagtaatgctcttcaggaaccttcatcctttagagtggatggcattcccaatgacagtagtgatagtgaaatggaggacaaaactacagctaatttggcagccttgaaacttgatgagtggctccatttcacactggagccagaggcagctagtttattgctgcagctcagacagaagtggcatagcttatttttacgccgaatgagagctccatctaaaccttggtctcaagttgatgaagctaccataagagcaattatagctgttttaagcactgaagaacagtctgcaggtttacaacaaccatctgggattggccaaaggccaaggcctatgtcttcagaagagcttcctttggcctcatcttggaggtcaaataatagtaggaaaagttcagcagatactgaattttctgatgagtgtactactgcagaaagagtactgatgaaatctccatctccagcattacacccacctcagaagtacaaagatagaggaattttacatcctaaacgaggtactgaggaccgatcagatcagtcttctctgaaatctacagacagcagtagttacccaagtccttgtgctagtccttctcctccatcctcaggaaagggctcaaaatctccttcgccaagaccaaacatgcctgttcgatacttcataatgaagagtagcaatttgagaaaccttgaaatttctcaacagaagggtatctggtctacaactcctagtaatgaacggaagctaaatcgagccttttgggaaagcagcatagtttacttggtattttctgttcaaggatctggacatttccagggattttctaggatgtcttctgagattggaagggaaaagagtcaggactggggctctgctggactaggaggagtatttaaggtggagtggatacgaaaagaaagccttccctttcaatttgcacaccatttactcaatccatggaatgacaacaagaaagtgcagataagcagggatgggcaggaactagaacctctggttggtgaacagttgctccagttatgggaacgtcttcccttgggagaaaaaaacacaactgattga

SEQ ID NO: 1422 - DNA, 1809 bp, homo sapiens; identical to SEQ ID NO: 1142

SEQ ID NO: 1423 - DNA, 2862 bp, homo sapiens
atggaagaaagtagcagtgttgccatgttggtgccagatattggggaacaggaagctatactgactgctgaaagtatcatcagtccttcattggaaattgatgaacaaagaaaaactaaaccagatccattaatccatgttatccagaagttaagcaagatagtggaaaatgaaaagtcacaaaaatgtcttttaattgggaagaaacgcccacgttcaagtgctgcaacacactctcttgaaacccaagaactttgtgagattccggctaaagtaatccagtcacctgctgctgatactagaagggctgagatgtcacaaacaaattttacccctgacactcttgcccagaatgaagggaaggctatgtcttatcagtgtagcctttgtaagtttctatcatcatccttttccgtgttaaaagatcatattaagcaacatggtcagcaaaatgaagtgatactgatgtgctcagagtgccatattacatctagaagccaggaggaacttgaagcccacgtggtgaatgaccatgacaatgatgccaatatccacacccaatccaaagcccaacagtgcgtaagcccctccagctctttgtgtcggaaaaccacagaaagaaatgaaaccattccagatatcccagtaagtgtggacaatctacagactcatactgtccaaactgcatctgtggcagaaatgggtaggaggaaatggtatgcatacgaacagtacggcatgtatcgatgcttgttttgtagttatacttgtggccagcagagaatgttgaaaacacacgcttggaaacatgctggggaggttgattgctcctatccaatctttgaaaatgaaaatgaacccctaggcctgctggattcttcagcagctgctgcgcctggtggggtcgatgcagtcgtcattgctattggagagagtgaactgagtatccacaatgggccatcagtgcaagtgcagatttgcagctcagaacagttatcatcttcatctcctttagaacagagtgcagaaagaggagtacacctaagtcagtcagttaccctggaccccaatgaggaagaaatgctagaagtgatttctgatgcagaggagaatctgattcctgatagcctgcttacatcagcacagaaaatcatcagcagcagccccaataaaaaagggcatgttaacgtgatagtggagcgattgccaagtgctgaagaaaccctttcacagaagcgcttcctcatgaacactgaaatggaagaagggaaggacctgagcctgacagaagctcagattgggcgcgaaggaatggatgatgtttatcgtgctgataaatgtactgttgatattgggggattgatcataggctggagcagttcagagaaaaaagacgagttaatgaataaaggcctggctactgatgagaatgccccaccaggccggagaaggacaaattctgagtctcttcgattacactcattagctgcagaagcccttgtcacaatgcctataagagctgcagagttgacaagagccaacctggggcactatggagatataaaccttttagatccagatactagtcaaaggcaagtagatagtacattggcagcgtactcaaaaatgatgtcgccacttaaaaactcttcagatggattaactagtcttaaccaaagcaactccaccttggtagcactcccagagggtaggcaggaattgtcagatgggcaggttaagacaggcatcagcatgtccttactcaccgtcattgaaaaattgagagaaaggacagaccaaaacgcttcagacgatgacattttgaaagagttgcaggacaacgcccagtgccaacccaacagcgatacaagtttgtccggaaacaatgtggtggaatacatcccgaatgctgaacgaccctaccgttgccgcctgtgtcactacacaagtggcaacaagggctacatcaagcagcacttacgagtccatcgacagagacagccttatcagtgtcctatctgcgagcacatagcggacaacagcaaagatttggagagtcacatgatccaccactgtaagacaagaatataccagtgcaagcagtgtgaagaatccttccattataagagtcaattgaggaaccatgagagagaacagcacagtcttccagataccttgtcaatagcaacttctaatgagccaagaatttccagtgatacagctgatggaaaatgtgtccaggaagggaataagtcttcagtccagaaacaatatagatgtgatgtgtgtgattatacaagtacaacatatgttggtgtcagaaaccacaggcgaatccataactctgataagccgtacagatgctctctgtgtgggtatgtgtgtagccatcctccttctttgaagtctcatatgtggaaacatgcaagtgaccaaaattacaactacgaacaagtaaacaaggctattaacgacgcgatttcacaaagtggcagagttctggggaaatcccctggaaagactcaattaaagagcagtgaagagagtgcagatcccgtcactggaagttcagaaaatgcagtgtcatcttcagaactgatgtcccagactcccagtgaagttctgggtaccaacgagaatgagaaactgagccctacaagtaatacctcatatagtttagaaaaaatctccagtctggcccctcctagcatggagtactgcgttttactcttctgctgttgtatttgtggttttgaatcaaccagcaaagaaaacctcttggatcatatgaaagagcacgagggtgaaattgtaaacatcatcctgaataaggaccacaatacagctctaaacacaaattag

SEQ ID NO: 1424 - DNA, 1065 bp, homo sapiens
atgtcagcctttgatatgtcccatgatttctttttctgcttaacttcagaatgggaaatacaacctagaaccaaacggtcatcacttcagcagggttttttgaagaatcaaatattcactgggatacaaatgcagacaagaagctacagtggatggaaactctgtgagaattgtggagaggtcttcagtgaacagttttgccttaagacacacatgagagctcagaatggagggaacacttttgagggtaattgttatggaaaagacagcatcagtgtgcacaaggaagcctctattggacaagaactttccaaatttaatccatgtggaaaagtcttcaccttaactccaggccttgctgtgcatcttgaaattctcaatggaagacaaccctacaaatgtaaggaatgtggaaaaggctttaagtattttgcaagccttgataatcacatgggaatccacattggagagaaactctgtgaatttcaggaatgtgagagagccatcacaacttcctcacacttaaagcagtgtgtagcagttcatactggaaagaaatccgaaaagactaagaactgtgggaaatccttcactaatttttctcaactttctgcacatgcaaaaactcataaaggagagaagtcctttgaatgtaaagaatgtggaagatcctttagaaattcctcatcctttaatgttcacattcaaattcacactggaataaaaccacacaaatgtacggaatgtgggaaagccttcactagatcaactcaccttactcaacatgtaagaactcacactggaataaaaccctatgaatgtaaggaatgtggccaagccttcactcagtacacgggccttgctatacacatacgaaatcacactggagagaaaccctatcagtgtaaggaatgtgggaaagccttcaatagatcttcaacgcttactcaacatagaagaattcacacaggagagaagccttatgaatgtgttgaatgtgggaagaccttcattacttcttcccatcgtagtaaacatttgaaaactcacagtggagaaaggtaa

SEQ ID NO: 1425 - protein, 918 aa, homo sapiens; identical to SEQ ID NO: 95

SEQ ID NO: 1426 - protein, 688 aa, homo sapiens
MADLEAVLADVSYLMAMEKSKATPAARASKRIVLPEPSIRSVMQKYLAERNEITFDKIFNQKIGFLLFKDFCLNEINEAVPQVKFYEEIKEYEKLDNEEDRLCRSRQIYDAYIMKELLSCSHPFSKQAVEHVQSHLSKKQVTSTLFQPYIEEICESLRGDIFQKFMESDKFTRFCQWKNVELNIHLTMNEFSVHRIIGRGGFGEVYGCRKADTGKMYAMKCLDKKRIKMKQGETLALNERIMLSLVSTGDCPFIVCMTYAFHTPDKLCFILDLMNGGDLHYHLSQHGVFSEKEMRFYATEIILGLEHMHNRFVVYRDLKPANILLDEHGHARISDLGLACDFSKKKPHASVGTHGYMAPEVLQKGTAYDSSADWFSLGCMLFKLLRGHSPFRQHKTKDKHEIDRMTLTVNVELPDTFSPELKSLLEGLLQRDVSKRLGCHGGGSQEVKEHSFFKGVDWQHVYLQKYPPPLIPPRGEVNAADAFDIGSFDEEDTKGIKLLDCDQELYKNFPLVISERWQQEVTETVYEAVNADTDKIEARKRAKNKQLGHEEDYALGKDCIMHGYMLKLGNPFLTQWQRRYFYLFPNRLEWRGEGESRQNLLTMEQILSVEETQIKDKKCILFRIKGGKQFVLQCESDPEFVQWKKELNETFKEAQRLLRRAPKFLNKPRSGTVELPKPSLCHRNSNGL

SEQ ID NO: 1427 - protein, 484 aa, homo sapiens; identical to SEQ ID NO: 1146

SEQ ID NO: 1428 - protein, 346 aa, homo sapiens
MARKSNLPVLLVPFLLCQALVRCSSPLPLVVNTWPFKNATEAAWRALASGGSALDAVESGCAMCEREQCDGSVGFGGSPDELGETTLDAMIMDGTTMDVGAVGDLRRIKNAIGVARKVLEHTTHTLLVGESATTFAQSMGFINEDLSTTASQALHSDWLARNCQPNYWRNVIPDPSKYCGPYKPPGILKQDIPIHKETEDDRGHDTIGMVVIHKTGHIAAGTSTNGIKFKIHGRVGDSPIPGAGAYADDTAGAAAATGNGDILMRFLPSYQAVEYMRRGEDPTIACQKVISRIQKHFPEFFGAVICANVTGSYGAACNKLSTFTQFSFMVYNSEKNQPTEEKVDCI

SEQ ID NO: 1429 - protein, 364 aa, homo sapiens [sequence omitted]

SEQ ID NO: 1430 - protein, 1001 aa, homo sapiens
MALPQSEDAMTGDTDKYLGPQDLKELGDDSLPAEGYMGFSLGARSASLRSFSSDRSYTLNRSSYARDSMMIEELLVPSKEQHLTFTREFDSDSLRHYSWAADTLDNVNLVSSPIHSGFLVSFMVDARGGSMRGSRHHGMRIIIPPRKCTAPTRITCRLVKRHKLANPPPMVEGEGLASRLVEMGPAGAQFLGPVIVEIPHFGSMRGKERELIVLRSENGETWKEHQFDSKNEDLTELLNGMDEELDSPEELGKKRICRIITKDFPQYFAVVSRIKQESNQIGPEGGILSSTTVPLVQASFPEGALTKRIRVGLQAQPVPDEIVKKILGNKATFSPIVTVEPRRRKFHKPITMTIPVPPPSGEGVSNGYKGDTTPNLRLLCSITGGTSPAQWEDITGTTPLTFIKDCVSFTTNVSARFWLADCHQVLETVGLATQLYRELICVPYMAKFVVFAKMNDPVESSLRCFCMTDDKVDKTLEQQENFEEVARSKDIEVLEGKPIYVDCYGNLAPLTKGGQQLVFNFYSFKENRLPFSIKIRDTSQEPCGRLSFLKEPKTTKGLPQTAVCNLNITLPAHKKIEKTDRRQSFASLALRKRYSYLTEPGMSPQSPCERTDIRMAIVADHLGLSWTELARELNFSVDEINQIRVENPNSLISQSFMLLKKWVTRDGKNATTDALTSVLTKINRIDIVTLLEGPIFDYGNISGTRSFADENNVFHDPVDGYPSLQVELETPTGLHYTPPTPFQQDDYFSDISSIESPLRTPSRLSDGLVPSQGNIEHSADGPPVVTAEDASLEDSKLEDSVPLTEMPEAVDVDESQLENVCLSWQNETSSGNLESCAQARRVTGGLLDRLDDSPDQCRDSITSYLKGEAGKFEANGSHTEITPEAKTKSYFPESQNDVGKQSTKETLKPKIHGSGHVEEPASPLAAYQKSLEETSKLIIEETKPCVPVSMKKMSRTSPADGKPRLSLHEEEGSSGSEQKQGEGFKVKTKKEIRHVEKKSHS

SEQ ID NO: 1431 - protein, 1501 aa, homo sapiens
MMAKNKEPRPPSYTISIVGLSGTEKDKGNCGVGKSCLCNRFVRSKADEYYPEHTSVLSTIDFGGRVVNNDHFLYWGDIIQNSEDGVECKIHVIEQTEFIDDQTFLPHRSTNLQPYIKRAAASKLQSAEKLMYICTDQLGLEQDFEQKQMPEGKLNVDGFLLCIDVSQGCNRKFDDQLKFVNNLFVQLSKSKKPVIIAATKCDECVDHYLREVQAFASNKKNLLVVETSARFNVNIETCFTALVQMLDKTRSKPKIIPYLDAYKTQRQLVVTATDKFEKLVQTVRDYHATWKTVSNKLKNHPDYEEYINLEGTRKARNTFSKHIEQLKQEHIRKRREEYINTLPRAFNTLLPNLEEIEHLNWSEALKLMEKRADFQLCFVVLEKTPWDETDHIDKINDRRIPFDLLSTLEAEKVYQNHVQHLISEKRRVEMKEKFKKTLEKIQFISPGQPWEEVMCFVMEDEAYKYITEADSKEVYGRHQREIVEKAKEEFQEMLFEHSELFYDLDLNATPSSDKMSEIHTVLSEEPRYKALQKLAPDRESLLLKHIGFVYHPTKETCLSGQNCTDIKVEQLLASSLLQLDHGRLRLYHDSTNIDKVNLFILGKDGLAQELANEIRTQSTDDEYALDGKIYELDLRPVDAKSPYFLSQLWTAAFKPHGCFCVFNSIESLSFIGEFIGKIRTEASQIRKDKYMANLPFTLILANQRDSISKNLPILRHQGQQLANKLQCPFVDVPAGTYPRKFNETQIKQALRGVLESVKHNLDVVSPIPANKDLSEADLRIVMCAMCGDPFSVDLILSPFLDSHSCSAAQAGQNNSLMLDKIIGEKRRRIQITILSYHSSIGVRKDELVHGYILVYSAKRKASMGMLRAFLSEVQDTIPVQLVAVTDSQADFFENEAIKELMTEGEHIATEITAKFTALYSLSQYHRQTEVFTLFFSDVLEKKNMIENSYLSDNTRESTHQSEDVFLPSPRDCFPYNNYPDSDDDTEAPPPYSPIGDDVQLLPTPSDRSRYRLDLEGNEYPIHSTPNCHDHERNHKVPPPIKPKPVVPKTNVKKLDPNLLKTIEAGIGKNPRKQTSRVPLAHPEDMDPSDNYAEPIDTIFKQKGYSDEIYVVPDDSQNRIKIRNSFVNNTQGDEENGFSDRTSKSHGERRPSKYKYKSKTLFSKAKSYYRRTHSDASDDEAFTTSKTKRKGRHRGSEEDPLLSPVETWKGGIDNPAITSDQELDDKKMKKKTHKVKEDKKKKKTKNFNPPTRRNWESNYFGMPLQDLVTAEKPIPLFVEKCVEFIEDTGLCTEGLYRVSGNKTDQDNIQKQFDQDHNINLVSMEVTVNAVAGALKAFFADLPDPLIPYSLHPELLEAAKIPDKTERLHALKEIVKKFHPVNYDVFRYVITHLNRVSQQHKINLMTADNLSICFWPTLMRPDFENREFLSTTKIHQSVVETFIQQCQFFFYNGEIVETTNIVAPPPPSNPGQLVEPMVPLQLPPPLQPQLIQPQLQTDPLGII

SEQ ID NO: 1432 - protein, 776 aa, homo sapiens
MNPEEQIVTWLISLGVLESPKKTICDPEEFLKSSLKNGVVLCKLINRLMPGSVEKFCLDPQTEADCINNINDFLKGCATLQVEIFDPDDLYSGVNFSKVLSTLLAVNKATEDQLSERPCGRSSSLSAANTSQTNPQGAVSSTVSGLQRQSKTVEMTENGSHQLIVKARFNFKQTNEDELSVCKGDIIYVTRVEEGGWWEGTLNGRTGWFPSNYVREIKSSERPLSPKAVKGFETAPLTKNYYTVVLQNILDTEKEYAKELQSLLVTYLRPLQSNNNLSTVEVTSLLGNFEEVCTFQQTLCQALEECSKFPENQHKVGGCLLSLMPHFKSMYLAYCANHPSAVNVLTQHSDELEQFMENQGASSPGILILTTNLSKPFMRLEKYVTLLQELERHMEDTHPDHQDILKAIVAFKTLMGQCQDLRKRKQLELQILSEPIQAWEGEDIKNLGNVIFMSQVMVQYGACEEKEERYLMLFSNVLIMLSASPRMSGFIYQGKIPIAGTVVTRLDEIEGNDCTFEITGNTVERIVVHCNNNQDFQEWLEQLNRLIRGPASCSSLSKTSSSSCSAHSSFSSTGQPRGPLEPPQIIKPWSLSCLRPAPPLRPSAALGYKERMSYILKESSKSPKTMKKFLHKRKTERKPSEEEYVIRKSTAALEEDAQILKVIEAYCTSANFQQGHGSSTRKDSIPQVLLPEEEKLIIEETRSNGQTIMEEKSLVDTVYALKDEVRELKQENKRMKQCLEEELKSRRDLEKLVRRLLKQTDECIRGESSSKTSILP

SEQ ID NO: 1433 - protein, 188 aa, homo sapiens
MDVNIAPLRAWDDFFPGSDRFARPDFRDISKWNNRVVSNLLYYQTNYLVVAAMMISIVGFLSPFNMILGGIVVVLVFTGFVWAAHNKDVLRRMKKRYPTTFVMVVMLASYFLISMFGGVMVFVFGITFPLLLMFIHASLRLRNLKNKLENKMEGIGLKRTPMGIVLDALEQQEEGINRLTDYISKVKE

SEQ ID NO: 1434 - protein, 2202 aa, homo sapiens
MALPRLTGALRSFSNVTKQDNYNEEVADLKIKRSKLHEQVLDLGLTWKKIIKFLNEKLEKSKMQSINEDLKDILHAAKQIVGTDNGREAIESGAAFLFMTFHLKDSVGHKETKAIKQMFGPFPSSSATAACNATNRIISHFSQDDLTALVQMTEKEHGDRVFFGKNLAFSFDMHDLDHFDELPINGETQKTISLDYKKFLNEHLQEACTPELKPVEKTNGSFLWCEVEKYLNSTLKEMTEVPRVEDLCCTLYDMLASIKSGDELQDELFELLGPEGLELIEKLLQNRITIVDRFLNSSNDHRFQALQDNCKKILGENAKPNYGCQVTIQSEQEKQLMKQYRREEKRIARREKKAGEDLEVSEGLMCFDPKELRIQREQALLNARSVPILSRQRDADVEKIHYPHVYDSQAEAMKTSAFIAGAKMILPEGIQRENNKLYEEVRIPYSEPMPLSFEEKPVYIQDLDEIGQLAFKGMKRLNRIQSIVFETAYNTNENMLICAPTGAGKTNIAMLTVLHEIRQHFQQGVIKKNEFKIVYVAPMKALAAEMTDYFSRRLEPLGIIVKELTGDMQLSKSEILRTQMLVTTPEKWDVVTRKSVGDVALSQIVRLLILDEVHLLHEDRGPVLESIVARTLRQVESTQSMIRILGLSATLPNYLDVATFLHVNPYIGLFFFDGRFRPVPLGQTFLGIKCANKMQQLNNMDEVCYENVLKQVKAGHQVMVFVHARNATVRTAMSLIERAKNCGHIPFFFPTQGHDYVLAEKQVQRSRNKQVRELFPDGFSIHHAGMLRQDRNLVENLFSNGHIKVLVCTATLAWGVNLPAHAVIIKGTQIYAAKRGSFVDLGILDVMQIFGRAGRPQFDKFGEGIIITTHDKLSHYLTLLTQRNPIESQFLESLADNLNAEIALGTVTNVEEAVKWISYTYLYVRMRANPLAYGISHKAYQIDPTLRKHREQLVIEVGRKLDKAQMIRFEERTGYFSSTDLGRTASHYYIKYNTIETFNELFDAHKTEGDIFAIVSKAEEFDQIKVREEEIEELDTLLSNFCELSTPGGVENSYGKINILLQTYISRGEMDSFSLISDSAYVAQNAARIVRALFEIALRKRWPTMTYRLLNLSKVIDKRLWGWASPLRQFSILPPHILTRLEEKKLTVDKLKDMRKDEIGHILHHVNIGLKVKQCVHQIPSVMMEASIQPITRTVLRVTLSIYADFTWNDQVHGTVGEPWWIWVEDPTNDHIYHSEYFLALKKQVISKEAQLLVFTIPIFEPLPSQYYIRAVSDRWLGAEAVCIINFQHLILPERHPPHTELLDLQPLPITALGCKAYEALYNFSHFNPVQTQIFHTLYHTDCNVLLGAPTGSGKTVAAELAIFRVFNKYPTSKAVYIAPLKALVRERMDDWKVRIEEKLGKKVIELTGDVTPDMKSIAKADLIVTTPEKWDGVSRSWQNRNYVQQVTILIIDEIHLLGEERGPVLEVIVSRTNFISSHTEKPVRIVGLSTALANARDLADWLNIKQMGLFNFRPSVRPVPLEVHIQGFPGQHYCPRMASMNKPAFQAIRSHSPAKPVLIFVSSRRQTRLTALELIAFLATEEDPKQWLNMDEREMENIIATVRDSNLKLTLAFGIGMHHAGLHERDRKTVEELFVNCKVQVLIATSTLAWGVNFPAHLVIIKGTEYYDGKTRRYVDFPITDVLQMMGRAGRPQFDDQGKAVILVHDIKKDFYKKFLYEPFPVESSLLGVLSDHLNAEIAGGTITSKQDALDYITWTYFFRRLIMNPSYYNLGDVSHDSVNKFLSHLIEKSLIELELSYCIEIGEDNRSIEPLTYGRIASYYYLKHQTVKMFKDRLKPECSTEELLSILSDAEEYTDLPVRHNEDHMNSELAKCLPIESNPHSFDSPHTKAHLLLQAHLSRAMLPCPDYDTDTKTVLDQALRVCQAMLDVAANQGWLVTVLNITNLIQMVIQGRWLKDSSLLTLPNIENHHLHLFKKWKPIMKGPHARGRTSIESLPELIHACGGKDHVFSSMVESELHAAKTKQAWNFLSHLPVINVGISVKGSWDDLVEGHNELSVSTLTADKRDDNKWIKLHADQEYVLQVSLQRVHFGFHKGKPESCAVTPRFPKSKDEGWFLILGEVDKRELIALKRVGYIRNHHVASLSFYTPEIPGRYIYTLYFMSDCYLGLDQQYDIYLNVTQASLSAQVNTKVSDSLTDLALK

SEQ ID NO: 1435 - protein, 1164 aa, homo sapiens
MPTMRRTVSEIRSRAEGYEKTDDVSEKTSLADQEEVRTIFINQPQLTKFCNNHVSTAKYNIITFLPRFLYSQFRRAANSFFLFIALLQQIPDVSPTGRYTTLVPLLFILAVAAIKEIIEDIKRHKADNAVNKKQTQVLRNGAWEIVHWEKVAVGEIVKVTNGEHLPADLISLSSSEPQAMCYIETSNLDGETNLKIRQGLPATSDIKDVDSLMRISGRIECESPNRHLYDFVGNIRLDGHGTVPLGADQILLRGAQLRNTQWVHGIVVYTGHDTKLMQNSTSPPLKLSNVERITNVQILILFCILIAMSLVCSVGSAIWNRRHSGKDWYLNLNYGGASNFGLNFLTFIILFNNLIPISLLVTLEVVKFTQAYFINWDLDMHYEPTDTAAMARTSNLNEELGQVKYIFSDKTGTLTCNVMQFKKCTIAGVAYGHVPEPEDYGCSPDEWQNSQFGDEKTFSDSSLLENLQNNHPTAPIICEFLTMMAVCHTAVPEREGDKIIYQAASPDEGALVRAAKQLNFVFTGRTPDSVIIDSLGQEERYELLNVLEFTSARKRMSVIVRTPSGKLRLYCKGADTVIYDRLAETSKYKEITLKHLEQFATEGLRTLCFAVAEISESDFQEWRAVYQRASTSVQNRLLKLEESYELIEKNLQLLGATAIEDKLQDQVPETIETLMKADIKIWILTGDKQETAINIGHSCKLLKKNMGMIVINEGSLDGTRETLSRHCTTLGDALRKENDFALIIDGKTLKYALTFGVRQYFLDLALSCKAVICCRVSPLQKSEVVEMVKKQVKVVTLAIGDGANDVSMIQTAHVGVGISGNEGLQAANSSDYSIAQFKYLKNLLMIHGAWNYNRVSKCILYCFYKNIVLYIIEIWFAFVNGFSGQILFERWCIGLYNVMFTAMPPLTLGIFERSCRKENMLKYPELYKTSQNALDFNTKVFWVHCLNGLFHSVILFWFPLKALQYGTAFGNGKTSDYLLLGNFVYTFVVITVCLKAGLETSYWTWFSHIAIWGSIALWVVFFGIYSSLWPAIPMAPDMSGEAAMLFSSGVFWMGLLFIPVASLLLDVVYKVIKRTAFKTLVDEVQELEAKSQDPGAVVLGKSLTERAQLLKNVFKKNHVNLYRSESLQQNLLHGYAFSQDENGIVSQSEVIRAYDTTKQRPDEW

SEQ ID NO: 1436 - protein, 361 aa, homo sapiens
MESIFHEKQEGSLCAQHCLNNLLQGEYFSPVELSSIAHQLDEEERMRMAEGGVTSEDYRTFLQQPSGNMDDSGFFSIQVISNALKVWGLELILFNSPEYQRLRIDPINERSFICNYKEHWFTVRKLGKQWFNLNSLLTGPELISDTYLALFLAQLQQEGYSIFVVKGDLPDCEADQLLQMIRVQQMHRPKLIGEELAQLKEQRVHKTDLERVLEANDGSGMLDEDEEDLQRALALSRQEIDMEDEEADLRRAIQLSMQGSSRNISQDMTQTSGTNLTSEELRKRREAYFEKQQQKQQQQQQQQQQGDLSGQSSHPCERPATSSGALGSDLGDAMSEEDMLQAAVTMSLETVRNDLKTEGKK

SEQ ID NO: 1437 - protein, 392 aa, homo sapiens
MAVVAAAAGWLLRLRAAGAEGHWRRLPGAGLARGFLHPAATVEDAAQRRQVAHFTFQPDPEPREYGQTQKMNLFQSVTSALDNSLAKDPTAVIFGEDVAFGGVFRCTVGLRDKYGKDRVFNTPLCEQGIVGFGIGIAVTGATAIAEIQFADYIFPAFDQIVNEAAKYRYRSGDLFNCGSLTIRSPWGCVGHGALYHSQSPEAFFAHCPGIKVVIPRSPFQAKGLLLSCIEDKNPCIFFEPKILYRAAAEEVPIEPYNIPLSQAEVIQEGSDVTLVAWGTQVHVIREVASMAKEKLGVSCEVIDLRTIIPWDVDTICKSVIKTGRLLISHEAPLTGGFASEISSTVQEECFLNLEAPISRVCGYDTPFPHIFEPFYIPDKWKCYDALRKMINY

SEQ ID NO: 1438 - protein, 316 aa, homo sapiens
MAVQVVQAVQAVHLESDAFLVCLNHALSTEKEEVMGLCIGELNDDTRSDSKFAYTGTEMRTVAEKVDAVRIVHIHSVIILRRSDKRKDRVEISPEQLSAASTEAERLAELTGRPMRVVGWYHSHPHITVWPSHVDVRTQAMYQMMDQGFVGLIFSCFIEDKNTKTGRVLYTCFQSIQAQKSSESLHGPRDFWSSSQHISIEGQKEEERYERIEIPIHIVPHVTIGKVCLESAVELPKILCQEEQDAYRRIHSLTHLDSVTKIHNGSVFTKNLCSQMSAVSGPLLQWLEDRLEQNQQHLQELQQEKEELMQELSSLE

SEQ ID NO: 1439 - protein, 527 aa, homo sapiens
MESAAALHFSRPASLLLLLLSLCALVSAQFIVVGPTDPILATVGENTTLRCHLSPEKNAEDMEVRWFRSQFSPAVFVYKGGRERTEEQMEEYRGRTTFVSKDISRGSVALVIHNITAQENGTYRCYFQEGRSYDEAILHLVVAGLGSKPLISMRGHEDGGIRLECISRGWYPKPLTVWRDPYGGVAPALKEVSMPDADGLFMVTTAVIIRDKSVRNMSCSINNTLLGQKKESVIFIPESFMPSVSPCAVALPIIVVILMIPIAVCIYWINKLQKEKKILSGEKEFERETREIALKELEKERVQKEEELQVKEKLQEELRWRRTFLHAVDVVLDPDTAHPDLFLSEDRRSVRRCPFRHLGESVPDNPERFDSQPCVLGRESFASGKHYWEVEVENVIEWTVGVCRDSVERKGEVLLIPQNGFWTLEMHKGQYRAVSSPDRILPLKESLCRVGVFLDYEAGDVSFYNMRDRSHIYTCPRSAFSVPVRPFFRLGCEDSPIFICPALTGANGVTVPEEGLTLHRVGTHQSL

SEQ ID NO: 1440 - protein, 419 aa, homo sapiens
MNKHQKPVLTGQRFKTRKRDEKEKFEPTVFRDTLVQGLNEAGDDLEAVAKFLDSTGSRLDYRRYADTLFDILVAGSMLAPGGTRIDDGDKTKMTNHCVFSANEDHETIRNYAQVFNKLIRRYKYLEKAFEDEMKKLLLFLKAFSETEQTKLAMLSGILLGNGTLPATILTSLFTDSLVKEGIAASFAVKLFKAWMAEKDANSVTSSLRKANLDKRLLELFPVNRQSVDHFAKYFTDAGLKELSDFLRVQQSLGTRKELQKELQERLSQECPIKEVVLYVKEEMKRNDLPETAVIGLLWTCIMNAVEWNKKEELVAEQALKHLKQYAPLLAVFSSQGQSELILLQKVQEYCYDNIHFMKAFQKIVVLFYKADVLSEEAILKWYKEAHVAKGKSVFLDQMKKFVEWLQNAEEESESEGEEN

SEQ ID NO: 1441 - protein, 140 aa, homo sapiens
MSRFLNVLRSWLVMVSIIAMGNTLQSFRDHTFLYEKLYTGKPNLVNGLQARTFGIWTLLSSVIRCLCAIDIHNKTLYHITLWTFLLALGHFLSELFVYGTAAPTIGVLAPLMVASFSILGMLVGLRYLEVEPVSRQKKRN

SEQ ID NO: 1442 - protein, 220 aa, homo sapiens
MLRLLLALNLFPSIQVTGNKILVKQSPMLVAYDNAVNLSCKYSYNLFSREFRASLHKGLDSAVEVCVVYGNYSQQLQVYSKTGFNCDGKLGNESVTFYLQNLYVNQTDIYFCKIEVMYPPPYLDNEKSNGTIIHVKGKHLCPSPLFPGPSKPFWVLVVVGGVLACYSLLVTVAFIIFWVRSKRSRLLHSDYMNMTPRRPGPTRKHYQPYAPPRDFAAYRS

SEQ ID NO: 1443 - protein, 261 aa, homo sapiens
MIETYNQTSPRSAATGLPISMKIFMYLLTVFLITQMIGSALFAVYLHRRLDKIEDERNLHEDFVFMKTIQRCNTGERSLSLLNCEEIKSQFEGFVKDIMLNKEETKKENSFEMQKGDQNPQIAAHVISEASSKTTSVLQWAEKGYYTMSNNLVTLENGKQLTVKRQGLYYIYAQVTFCSNREASSQAPFIASLCLKSPGRFERILLRAANTHSSAKPCGQQSIHLGGVFELQPGASVFVNVTDPSQVSHGTGFTSFGLLKL

SEQ ID NO: 1444 - protein, 328 aa, homo sapiens
MAQHHLWILLLCLQTWPEAAGKDSEIFTVNGILGESVTFPVNIQEPRQVKIIAWTSKTSVAYVTPGDSETAPVVTVTHRNYYERIHALGPNYNLVISDLRMEDAGDYKADINTQADPYTTTKRYNLQIYRRLGKPKITQSLMASVNSTCNVTLTCSVEKEEKNVTYNWSPLGEEGNVLQIFQTPEDQELTYTCTAQNPVSNNSDSISARQLCADIAMGFRTHHTGLLSVLAMFFLLVLILSSVFLFRLFKRRQDAASKKTIYTYIMASRNTQPAESRIYDEILQSKVLPSKEEPVNTVYSEVQFADKMGKASTQDSKPPGTSSYEIVI

SEQ ID NO: 1445 - protein, 146 aa, homo sapiens [sequence omitted]

SEQ ID NO: 1446 - protein, 326 aa, homo sapiens
MEKDGLCRADQQYECVAEIGEGAYGKVFKARDLKNGGRFVALKRVRVQTGEEGMPLSTIREVAVLRHLETFEHPNVVRLFDVCTVSRTDRETKLTLVFEHVDQDLTTYLDKVPEPGVPTETIKDMMFQLLRGLDFLHSHRVVHRDLKPQNILVTSSGQIKLADFGLARIYSFQMALTSVVVTLWYRAPEVLLQSSYATPVDLWSVGCIFAEMFRRKPLFRGSSDVDQLGKILDVIGLPGEEDWPRDVALPRQAFHSKSAQPIEKFVTDIDELGKDLLLKCLTFNPAKRISAYSALSHPYFQDLERCKENLDSHLPPSQNTSELNTA

SEQ ID NO: 1447 - protein, 198 aa, homo sapiens
MSNVRVSNGSPSLERMDARQAEHPKPSACRNLFGPVDHEELTRDLEKHCRDMEEASQRKWNFDFQNHKPLEGKYEWQEVEKGSLPEFYYRPPRPPKGACKVPAQESQDVSGSRPAAPLIGAPANSEDTHLVDPKTDPSDSQTGLAEQCAGIRKRPATDDSSTQNKRANRTEENVSDGSPNAGSVEQTPKKPGLRRRQT

SEQ ID NO: 1448 - protein, 682 aa, homo sapiens
MSTPAVPQDLQLPPSQRAQSAFKEQRRQKLKEHLLRRKTLFAYKQENEMLSSRDQRVVTSEDQVQEGTKVLKLKTKMADKENMKRPAESKNNTVVGKHCIPLKPSNELTNSTVVIDTHKPKDSNQTPHLLLTEDDPQSQHMTLSQAFHLKNNSKKKQMTTEKQKQDANMPKKPVLGSYRGQIVQSKINSFRKPLQVKDESSAATKKLSATIPKATKPQPVNTSSVTVKSNRSSNMTATTKFVSTTSQNTQLVRPPIRSHHSNTRDTVKQGISRTSANVTIRKGPHEKELLQSKTALSSVKTSSSQGIIRNKTLSRSIASEVIARPASLSNDKLMEKSEPVDQRRHTAGKAIVDSRSAQPKETSEERKARLSEWKAGKGRVLKRPPNSVVTQHEPAGQNEKPVGSFWTTMAEEDEQRLFTEKVNNTFSECLNLINEGCPKEDILVTLNDLIKNIPDAKKLVKYWICLALIEPITSPIENIIAIYEKAILAGAQPIEEMRHTIVDILTMKSQEKANLGENMEKSCASKEEVKEVSIEDTGVDVDPEKLEMESKLHRNLLFQDCEKEQDNKTKDPTHDVKTPNTETRTSCLIKYNVSTTPYLQSVKKKVQFDGTNSAFKELKFLTPVRRSRRLQEKTSKLPDMLKDHYPCVSSLEQLTELGRETDAFVCRPNAALCRVYYEADTT

SEQ ID NO: 1449 - protein, 219 aa, homo sapiens
MNSSKSSETQCTERGCFSSQMFLWTVAGIPILFLSACFITRCVVTFRIFQTCDEKKFQLPENFTELSCYNYGSGSVKNCCPLNWEYFQSSCYFFSTDTISWALSLKNCSAMGAHLVVINSQEEQEFLSYKKPKMREFFIGLSDQVVEGQWQWVDGTPLTKSLSFWDVGEPNNIATLEDCATMRDSSNPRQNWNDVTCFLNYFRICEMVGINPLNKGKSL

SEQ ID NO: 1450 - protein, 846 aa, homo sapiens
MLFTVSCSKMSSIVDRDDSSIFDGLVEEDDKDKAKRVSRNKSEKKRRDQFNVLIKELGSMLPGNARKMDKSTVLQKSIDFLRKHKEITAQSDASEIRQDWKPTFLSNEEFTQLMLEALDGFFLAIMTDGSIIYVSESVTSLLEHLPSDLVDQSIFNFIPEGEHSEVYKILSTHLLESDSLTPEYLKSKNQLEFCCHMLRGTIDPKEPSTYEYVKFIGNFKSLNSVSSSAHNGFEGTIQRTHRPSYEDRVCFVATVRLATPQFIKEMCTVEEPNEEFTSRHSLEWKFLFLDHRAPPIIGYLPFEVLGTSGYDYYHVDDLENLAKCHEHLMQYGKGKSCYYRFLTKGQQWIWLQTHYYITYHQWNSRPEFIVCTHTVVSYAEVRAERRRELGIEESLPETAADKSQDSGSDNRINTVSLKEALERFDHSPTPSASSRSSRKSSHTAVSDPSSTPTKIPTDTSTPPRQHLPAHEKMVQRRSSFSSQSINSQSVGSSLTQPVMSQATNLPIPQGMSQFQFSAQLGAMQHLKDQLEQRTRMIEANIHRQQEELRKIQEQLQMVHGQGLQMFLQQSNPGLNFGSVQLSSGNSSNIQQLAPINMQGQVVPTNQIQSGMNTGHIGTTQHMIQQQTLQSTSTQSQQNVLSGHSQQTSLPSQTQSTLTAPLYNTMVISQPAAGSMVQIPSSMPQNSTQSAAVTTFTQDRQIRFSQGQQLVTKLVTAPVACGAVMVPSTMLMGQVVTAYPTFATQQQQSQTLSVTQQQQQQSSQEQQLTSVQQPSQAQLTQPPQQFLQTSRLLHGNPSTQLILSAAFPLQQSTFPQSHHQQHQSQQQQQLSRHRTDSLPDPSKVQPQ

SEQ ID NO: 1451 - protein, 413 aa, homo sapiens
MSFRDLRNFTEMMRALGYPRHISMENFRTPNFGLVSEVLLWLVKRYEPQTDIPPDVDTEQDRVFFIKAIAQFMATKAHIKLNTKKLYQADGYAVKELLKITSVLYNAMKTKGMEGSEIVEEDVNKFKFDLGSKIADLKAARQLASEITSKGASLYDLLGMEVELREMRTEAIARPLEINETEKVMRIAIKEILTQVQKTKDLLNNVASDEANLEAKIEKRKLELERNRKRLETLQSVRPCFMDEYEKTEEELQKQYDTYLEKFQNLTYLEQQLEDHHRMEQERFEEAKNTLCLIQNKLKEEEKRLLKSGSNDDSDIDIQEDDESDSELEERRLPKPQTAMEMLMQGRPGKRIVGTMQGGDSDDNEDSEESEIDMEDDDDEDDDLEDESISLSPTKPNRRVRKSEPLDESDNDF

SEQ ID NO: 1452 - protein, 417 aa, homo sapiens
MRLILPVGLIATTLAIAPVRFDREKVFRVKPQDEKQADIIKDLAKTNELDFWYPGATHHVAANMMVDFRVSEKESQAIQSALDQNKMHYEILIHDLQEEIEKQFDVKEDIPGRHSYAKYNNWEKIVAWTEKMMDKYPEMVSRIKIGSTVEDNPLYVLKIGEKNERRKAIFTDCGIHAREWVSPAFCQWFVYQATKTYGRNKIMTKLLDRMNFYILPVFNVDGYIWSWTKNRMWRKNRSKNQNSKCIGTDLNRNFNASWNSIPNTNDPCADNYRGSAPESEKETKAVTNFIRSHLNEIKVYITFHSYSQMLLFPYGYTSKLPPNHEDLAKVAKIGTDVLSTRYETRYIYGPIESTIYPISGSSLDWAYDLGIKHTFAFELRDKGKFGFLLPESRIKPTCRETMLAVKFIAKYILKHTS

SEQ ID NO: 1453 - protein, 327 aa, homo sapiens; identical to SEQ ID NO: 662

SEQ ID NO: 1454 - protein, 520 aa, homo sapiens
MPQLSLSSLGLWPMAASPWLLLLLVGASWLLARILAWTYTFYDNCCRLRCFPQPPKRNWFLGHLGLIHSSEEGLLYTQSLACTFGDMCCWWVGPWHAIVRIFHPTYIKPVLFAPAAIVPKDKVFYSFLKPWLGDGLLLSAGEKWSRHRRMLTPAFHFNILKPYMKIFNESVNIMHAKWQLLASEGSARLDMFEHISLMTLDSLQKCVFSFDSHCQEKPSEYIAAILELSALVTKRHQQILLYIDFLYYLTPDGQRFRRACRLVHDFTDAVIQERRRTLPSQGVDDFLQAKAKSKTLDFIDVLLLSKDEDGKKLSDEDIRAEADTFMFEGHDTTASGLSWVLYHLAKHPEYQERCRQEVQELLKDREPKEIEWDDLAQLPFLTMCIKESLRLHPPVPAVSRCCTQDIVLPDGRVIPKGIICLISVFGTHHNPAVWPDPEVYDPFRFDPKNIKERSPLAFIPFSAGPRNCIGQAFAMAEMKVVLGLTLLRFRVLPDHTEPRRKPELVLRAEGGLWLRVEPLS

SEQ ID NO: 1455 - protein, 337 aa, homo sapiens
MDETGNLTVSSATCHDTIDDFRNQVYSTLYSMISVVGFFGNGFVLYVLIKTYHKKSAFQVYMINLAVADLLCVCTLPLRVVYYVHKGIWLFGDFLCRLSTYALYVNLYCSIFFMTAMSFFRCIAIVFPVQNINLVTQKKARFVCVGIWIFVILTSSPFLMAKPQKDEKNNTKCFEPPQDNQTKNHVLVLHYVSLFVGFIIPFVIIIVCYTMIILTLLKKSMKKNLSSHKKAIGMIMVVTAAFLVSFMPYHIQRTIHLHFLHNETKPCDSVLRMQKSVVITLSLAASNCCFDPLLYFFSGGNFRKRLSTFRKHSLSSVTYVPRKKASLPEKGEEICKV

SEQ ID NO: 1456 - protein, 1101 aa, homo sapiens
MEQPGAAASGAGGGSEEPGGGRSNKRSAGNRAANEEETKNKPKLNIQIKTLADDVRDRITSFRKSTVKKEKPLIQHPIDSQVAMSEFPAAQPLYDERSLNLSEKEVLDLFEKMMEDMNLNEEKKAPLRNKDFTTKREMVVQYISATAKSGGLKNSKHECTLSSQEYVHELRSGISDEKLLNCLESLRVSLTSNPVSWVNNFGHEGLGLLLDELEKLLDKKQQENIDKKNQYKLIQCLKAFMNNKFGLQRILGDERSLLLLARAIDPKQPNMMTEIVKILSAICIVGEENILDKLLGAITTAAERNNRERFSPIVEGLENQEALQLQVACMQFINALVTSPYELDFRIHLRNEFLRSGLKTMLPDLKEKENDELDIQLKVFDENKEDDLTELSHRLNDIRAEMDDMNEVYHLLYNMLKDTAAENYFLSILQHFLLIRNDYYIRPQYYKIIEECVSQIVLHCSGMDPDFKYRQRLDIDLTHLIDSCVNKAKVEESEQKAAEFSKKFDEEFTARQEAQAELQKRDEKIKELEAEIQQLRTQAQVLSSSSGIPGPPAAPPLPGVGPPPPPPAPPLPGGAPLPPPPPPLPGMMGIPPPPPPPLLFGGPPPPPPLGGVPPPPGISLNLPYGMKQKKMYKPEVSMKRINWSKIEPTELSENCFWLRVKEDKFENPDLFAKLALNFATQIKVQKNAEALEEKKTGPTKKKVKELRILDPKTAQNLSIFLGSYRMPYEDIRNVILEVNEDMLSEALIQNLVKHLPEQKILNELAELKNEYDDLCEPEQFGVVMSSVKMLQPRLSSILFKLTFEEHINNIKPSIIAVTLACEELKKSESFNRLLELVLLVGNYMNSGSRNAQSLGFKINFLCKIRDTKSADQKTTLLHFIADICEEKYRDILKFPEELEHVESASKVSAQILKSNLASMEQQIVHLERDIKKFPQAENQHDKFVEKMTSFTKTAREQYEKLSTMHNNMMKLYENLGEYFIFDSKTVSIEEFFGDLNNFRTLFLEAVRENNKRREMEEKTRRAKLAKEKAEQEKLERQKKKKQLIDINKEGDETGVMDNLLEALQSGAAFRDRRKRIPRNPDNRRVPLERSRSRHNGAISSK

SEQ ID NO: 1457 - protein, 240 aa, homo sapiens
MATDELATKLSRRLQMEGEGGGETPEQPGLNGAAAAAAGAPDEAAEALGSADCELSAKLLRRADLNQGIGEPQSPSRRVFNPYTEFKEFSRKQIKDMEKMFKQYDAGRDGFIDLMELKLMMEKLGAPQTHLGLKNMIKEVDEDFDSKLSFREFLLIFRKAAAGELQEDSGLCVLARLSEIDVSSEGVKGAKSFFEAKVQAINVSSRFEEEIKAEQEERKKQAEEMKQRKAAFKELQSTFK

SEQ ID NO: 1458 - protein, 1120 aa, homo sapiens
MVLNSLDKMIQLQKNTANIRNICVLAHVDHGKTTLADCLISSNGIISSRLAGKLRYMDSREDEQIRGITMKSSAISLHYATGNEEYLINLIDSPGHVDFSSEVSTAVRICDGCIIVVDAVEGVCPQTQAVLRQAWLENIRPVLVINKIDRLIVELKFTPQEAYSHLKNILEQINALTGTLFTSKVLEERAERETESQVNPNSEQGEQVYDWSTGLEDTDDSHLYFSPEQGNVVFTSAIDGWGFGIEHFARIYSQKIGIKKEVLMKTLWGDYYINMKAKKIMKGDQAKGKKPLFVQLILENIWSLYDAVLKKDKDKIDKIVTSLGLKIGAREARHSDPKVQINAICSQWLPISHAVLAMVCQKLPSPLDITAERVERLMCTGSQTFDSFPPETQALKAAFMKCGSEDTAPVIIFVSKMFAVDAKALPQNKPRPLTQEEIAQRRERARQRHAEKLAAAQGQAPLEPTQDGSAIETCPKGEEPRGDEQQVESMTPKPVLQEENNQESFIAFARVFSGVARRGKKIFVLGPKYSPLEFLRRVPLGFSAPPDGLPQVPHMAYCALENLYLLMGRELEYLEEVPPGNVLGIGGLQDFVLKSATLCSLPSCPPFIPLNFEATPIVRVAVEPKHPSEMPQLVKGMKLLNQADPCVQILIQETGEHVLVTAGEVHLQRCLDDLKERFAKIHISVSEPIIPFRETITKPPKVDMVNEEIGKQQKVAVIHQMKEDQSKIPEGIQVDSDGLITITTPNKLATLSVRAMPLPEEVTQILEENSDLIRSMEQLTSSLNEGENTHMIHQKTQEKIWEFKGKLEQHLTGRRWRNIVDQIWSFGPRKCGPNILVNKSEDFQNSVWTGPADKASKEASRYRDLGNSIVSGFQLATLSGPMCEEPLMGVCFVLEKWDLSKFEEQGASDLAKEGQEENETCSGGNENQELQDGCSEAFEKRTSQKGESPLTDCYGPFSGQLIATMKEACRYALQVKPQRLMAAMYTCDIMATGDVLGRVYAVLSKREGRVLQEEMKEGTDMFIIKAVLPVAESFGFADEIRKRTSGLASPQLVFSHWEIIPSDPFWVPTTEEEYLHFGEKADSENQARKYMNAVRKRKGLYVEEKIVEHAEKQRTLSKNK

SEQ ID NO: 1459 - protein, 1220 aa, homo sapiens
MGKKQKNKSEDSTKDDIDLDALAAEIEGAGAAKEQEPQKSKGKKKKEKKKQDFDEDDILKELEELSLEAQGIKADRETVAVKPTENNEEEFTSKDKKKKGQKGKKQSFDDNDSEELEDKDSKSKKTAKPKVEMYSGSDDDDDFNKLPKKAKGKAQKSNKKWDGSEEDEDNSKKIKERSRINSSGESGDESDEFLQSRKGQKKNQKNKPGPNIESGNEDDDASFKIKTVAQKKAEKKERERKKRDEEKAKLRKLKEKEELETGKKDQSKQKESQRKFEEETVKSKVTVDTGVIPASEEKAETPTAAEDDNEGDKKKKDKKKKKGEKEEKEKEKKKGPSKATVKAMQEALAKLKEEEERQKREEEERIKRLEELEAKRKEEERLEQEKRERKKQKEKERKERLKKEGKLLTKSQREARARAEATLKLLQAQGVEVPSKDSLPKKRPIYEDKKRKKIPQQLESKEVSESMELCAAVEVMEQGVPEKEETPPPVEPEEEEDTEDAGLDDWEAMASDEETEKVEGNKVHIEVKENPEEEEEEEEEEEEDEESEEEEEEEGESEGSEGDEEDEKVSDEKDSGKTLDKKPSKEMSSDSEYDSDDDRTKEERAYDKAKRRIEKRRLEHSKNVNTEKLRAPIICVLGHVDTGKTKILDKLRHTHVQDGEAGGITQQIGATNVPLEAINEQTKMIKNFDRENVRIPGMLIIDTPGHESFSNLRNRGSSLCDIAILVVDIMHGLEPQTIESINLLKSKKCPFIVALNKIDRLYDWKKSPDSDVAATLKKQKKNTKDEFEERAKAIIVEFAQQGLNAALFYENKDPRTFVSLVPTSAHTGDGMGSLIYLLVELTQTMLSKRLAHCEELRAQVMEVKALPGMGTTIDVILINGRLKEGDTIIVPGVEGPIVTQIRGLLLPPPMKELRVKNQYEKHKEVEAAQGVKILGKDLEKTLAGLPLLVAYKEDEIPVLKDELIHELKQTLNAIKLEEKGVYVQASTLGSLEALLEFLKTSEVPYAGINIGPVHKKDVMKASVMLEHDPQYAVILAFDVRIERDAQEMADSLGVRIFSAEIIYHLFDAFTKYRQDYKKQKQEEFKHIAVFPCKIKILPQYIFNSRDPIVMGVTVEAGQVKQGTPMCVPSKNFVDIGIVTSIEINHKQVDVAKKGQEVCVKIEPIPGESPKMFGRHFEATDILVSKISRQSIDALKDWFRDEMQKSDWQLIVELKKVFEII

SEQ ID NO: 1460 - protein, 443 aa, homo sapiens
MVRGRISRLSVRDVRFPTSLGGHGADAMHTDPDYSAAYVVIETDAEDGIKGCGITFTLGKGTEVVVCAVNALAHHVLNKDLKDIVGDFRGFYRQLTSDGQLRWIGPEKGVVHLATAAVLNAVWDLWAKQEGKPVWKLLVDMDPRMLVSCIDFRYITDVLTEEDALEILQKGQIGKKEREKQMLAQGYPAYTTSCAWLGYSDDTLKQLCAQALKDGWTRFKVKVGADLQDDMRRCQIIRDMIGPEKTLMMDANQRWDVPEAVEWMSKLAKFKPLWIEEPTSPDDILGHATISKALVPLGIGIATGEQCHNRVIFKQLLQAKALQFLQIDSCRLGSVNENLSVLLMAKKFEIPVCPHAGGVGLCELVQHLIIFDYISVSASLENRVCEYVDHLHEHFKYPVMIQRASYMPPKDPGYSTEMKEESVKKHQYPDGEVWKKLLPAQEN

SEQ ID NO: 1461 - protein, 510 aa, homo sapiens
MEDTKESNVKTFCSKNILAILGFSSIIAVIALLAVGLTQNKALPENVKYGIVLDAGSSHTSLYIYKWPAEKENDTGVVHQVEECRVKGPGISKFVQKVNEIGIYLTDCMERAREVIPRSQHQETPVYLGATAGMRLLRMESEELADRVLDVVERSLSNYPFDFQGARIITGQEEGAYGWITINYLLGKFSQKTRWFSIVPYETNNQETFGALDLGGASTQVTFVPQNQTIESPDNALQFRLYGKDYNVYTHSFLCYGKDQALWQKLAKDIQVASNEILRDPCFHPGYKKVVNVSDLYKTPCTKRFEMTLPFQQFEIQGIGNYQQCHQSILELFNTSYCPYSQCAFNGIFLPPLQGDFGAFSAFYFVMKFLNLTSEKVSQEKVTEMMKKFCAQPWEEIKTSYAGVKEKYLSEYCFSGTYILSLLLQGYHFTADSWEHIHFIGKIQGSDAGWTLGYMLNLTNMIPAEQPLSTPLSHSTYVFLMVLFSLVLFTVAIIGLLIFHKPSYFWKDMV

SEQ ID NO: 1462 - protein, 916 aa, homo sapiens
MESGQPARRIAMAPLLEYERQLVLELLDTDGLVVCARGLGADRLLYHFLQLHCHPACLVLVLNTQPAEEEYFINQLKIEGVEHLPRRVTNEITSNSRYEVYTQGGVIFATSRILVVDFLTDRIPSDLITGILVYRAHRIIESCQEAFILRLFRQKNKRGFIKAFTDNAVAFDTGFCHVERVMRNLFVRKLYLWPRFHVAVNSFLEQHKPEVVEIHVSMTPTMLAIQTAILDILNACLKELKCHNPSLEVEDLSLENAIGKPFDKTIRHYLDPLWHQLGAKTKSLVQDLKILRTLLQYLSQYDCVTFLNLLESLRATEKAFGQNSGWLFLDSSTSMFINARARVYHLPDAKMSKKEKISEKMEIKEGEETKKELVLESNPKWEALTEVLKEIEAENKESEALGGPGQVLICASDDRTCSQLRDYITLGAEAFLLRLYRKTFEKDSKAEEVWMKFRKEDSSKRIRKSHKRPKDPQNKERASTKERTLKKKKRKLTLTQMVGKPEELEEEGDVEEGYRREISSSPESCPEEIKHEEFDVNLSSDAAFGILKEPLTIIHPLLGCSDPYALTRVLHEVEPRYVVLYDAELTFVRQLEIYRASRPGKPLRVYFLIYGGSTEEQRYLTALRKEKEAFEKLIREKASMVVPEEREGRDETNLDLVRGTASADVSTDTRKAGGQEQNGTQQSIVVDMREFRSELPSLIHRRGIDIEPVTLEVGDYILTPEMCVERKSISDLIGSLNNGRLYSQCISMSRYYKRPVLLIEFDPSKPFSLTSRGALFQEISSNDISSKLTLLTLHFPRLRILWCPSPHATAELFEELKQSKPQPDAATALAITADSETLPESEKYNPGPQDFLLKMPGVNAKNCRSLMHHVKNIAELAALSQDELTSILGNAANAKQLYDFIHTSFAEVVSKGKGKK

SEQ ID NO: 1463 - protein, 851 aa, homo sapiens
MSSKQEIMSDQRFRRVAKDPRFWEMPEKDRKVKIDKRFRAMFHDKKFKLNYAVDKRGRPISHSTTEDLKRFYDLSDSDSNLSGEDSKALSQKKIKKKKTQTKKEIDSKNLVEKKKETKKANHKGSENKTDLDNSIGIKKMKTSCKFKIDSNISPKKDSKEFTQKNKKEKKNIVQHTTDSSLEEKQRTLDSGTSEIVKSPRIECSKTRREMQSVVQLIMTRDSDGYENSTDGEMCDKDALEEDSESVSEIGSDEESENEITSVGRASGDDDGSEDDEEEDEDEEEDEDEDSEDDDKSDSGPDLARGKGNIETSSEDEDDTADLFPEESGFEHAWRELDKDAPRADEITRRLAVCNMDWDRLKAKDLLALFNSFKPKGGVIFSVKIYPSEFGKERMKEEQVQGPVELLSIPEDAPEKDWTSREKLRDYQFKRLKYYYAVVDCDSPETASKIYEDCDGLEFESSCSFIDLRFIPDDITFDDEPKDVASEVNLTAYKPKYFTSAAMGTSTVEITWDETDHERITMLNRKFKKEELLDMDFQAYLASSSEDEEEIEEELQGDDGVNVEEDGKTKKSQKDDEEQIAKYRQLLQVIQEKEKKGKENDMEMEIKWVPGLKESAEEMVKNKLEGKDKLTPWEQFLEKKKEKKRLKRKQKALAEEASEEELPSDVDLNDPYFAEEVKQIGINKKSVKSAKDGTSPEEEIEIERQKAEMALLMMDEDEDSKKHFNYNKIVEHQNLSKKKKKQLMKKKELIEDDFEVNVNDARFQAMYTSHLFNLDPSDPNFKKTKAMEKILEEKARQRERKEQELTQAIKKKESEIEKESQRKSIDPALSMLIKSIKTKTEQFQARKKQKVK

SEQ ID NO: 1464 - protein, 653 aa, homo sapiens
MIPPQEASARRREIEDKLKQEEETLSFIRDSLEKSDQLTKNMVSILSSFESRLMKLENSIIPVHKQTENLQRLQENVEKTLSCLDHVISYYHVASDTEKIIREGPTGRLEEYLGSMAKIQKAVEYFQDNSPDSPELNKVKLLFERGKEALESEFRSLMTRHSKVVSPVLILDLISGDDDLEAQEDVTLEHLPESVLQDVIRISRWLVEYGRNQDFMNVYYQIRSSQLDRSIKGLKEHFHKSSSSSGVPYSPAIPNKRKDTPTKKPVKRPGRDDMLDVETDAYIHCVSAFVKLAQSEYQLLADIIPEHHQKKTFDSLIQDALDGLMLEGENIVSAARKAIVRHDFSTVLTVFPILRHLKQTKPEFDQVLQGTAASTKNKLPGLITSMETIGAKALEDFADNIKNDPDKEYNMPKDGTVHELTSNAILFLQQLLDFQETAGAMLASQETSSSATSYSSEFSKRLLSTYICKVLGNLQLNLLSKSKVYEDPALSAIFLHNNYNYILKSLEKSELIQLVAVTQKTAERSYREHIEQQIQTYQRSWLKVTDYIAEKNLPVFQPGVKLRDKERQIIKERFKGFNDGLEELCKIQKAWAIPDTEQRDRIRQAQKTIVKETYGAFLQKFGSVPFTKNPEKYIKYGVEQVGDMIDRLFDTSA

SEQ ID NO: 1465 - protein, 919 aa, homo sapiens; identical to SEQ ID NO: 111

SEQ ID NO: 1466 - protein, 710 aa, homo sapiens
MLTTLKPFGSVSVESKMNNKAGSFFWNLRQFSTLVSTSRTMRLCCLGLCKPKIVHSNWNILNNFHNRMQSTDIIRYLFQDAFIFKSDVGFQTKGISTLTALRIERLLYAKRLFFDSKQSLVPVDKSDDELKKVNLNHEVSNEDVLTKETKPNRISSRKLSEECNSLSDVLDAFSKAPTFPSSNYFTAMWTIAKRLSDDQKRFEKRLMFSHPAFNQLCEHMMREAKIMQYKYLLFSLHAIVKLGIPQNTILVQTLLRVTQERINECDEICLSVLSTVLEAMEPCKNVHVLRTGFRILVDQQVWKIEDVFTLQVVMKCIGKDAPIALKRKLEMKALRELDRFSVLNSQHMFEVLAAMNHRSLILLDECSKVVLDNIHGCPLRIMINILQSCKDLQYHNLDLFKGLADYVAATFDIWKFRKVLFILILFENLGFRPVGLMDLFMKRIVEDPESLNMKNILSILHTYSSLNHVYKCQNKEQFVEVMASALTGYLHTISSENLLDAVYSFCLMNYFPLAPFNQLLQKDIISELLTSDDMKNAYKLHTLDTCLKLDDTVYLRDIALSLPQLPRELPSSHTNAKVAEVLSSLLGGEGHFSKDVHLPHNYHIDFEIRMDTNRNQVLPLSDVDTTSATDIQRVAVLCVSRSAYCLGSSHPRGFLAMKMRHLNAMGFHVILVNNWEMDKLEMEDAVTFLKTKIYSVEALPVAAVNVQSTQ

SEQ ID NO: 1467 - protein, 198 aa, homo sapiens
MGKQKKTRKYATMKRMLSLRDQRLKEKDRLKPKKKEKKDPSALKEREVPQHPSCLFFQYNTQLGPPYHILVDTNFINFSIKAKLDLVQSMMDCLYAKCIPCITDCVMAEIEKLGQKYRVALRIAKDPRFERLPCTHKGTYADDCLVQRVTQHKCYIVATVDRDLKRRIRKIPGVPIMYISNHRYNIERMPDDYGAPRF

SEQ ID NO: 1468 - protein, 412 aa, homo sapiens
MTDLYYLSQTDGAGDWREKEAKDLTELVQRRITYLQNPKDCSKAKKLVCNINKGCGYGCQLHHVVYCFMIAYGTQRTLILESQNWRYATGGWETVFRPVSETCTDRSGISTGHWSGEVKDKNVQVVELPIVDSLHPRPPYLPLAVPEDLADRLVRVHGDPAVWWVSQFVKYLIRPQPWLEKEIEEATKKLGFKHPVIGVHVRRTDKVGTEAAFHPIEEYMVHVEEHFQLLARRMQVDKKRVYLATDDPSLLKEAKTKYPNYEFISDNSISWSAGLHNRYTENSLRGVILDIHFLSQADFLVCTFSSQVCRVAYEIMQTLHPDASANFHSLDDIYYFGGQNAHNQIAIYAHQPRTADEIPMEPGDIIGVAGNHWDGYSKGVNRKLGRTGLYPSYKVREKIETVKYPTYPEAEK

SEQ ID NO: 1469 - protein, 466 aa, homo sapiens
MVMEKPSPLLVGREFVRQYYTLLNQAPDMLHRFYGKNSSYVHGGLDSNGKPADAVYGQKEIHRKVMSQNFTNCHTKIRHVDAHATLNDGVVVQVMGLLSNNNQALRRFMQTFVLAPEGSVANKFYVHNDIFRYQDEVFGGFVTEPQEESEEEVEEPEERQQTPEVVPDDSGTFYDQAVVSNDMEEHLEEPVAEPEPDPEPEPEQEPVSEIQEEKPEPVLEETAPEDAQKSSSPAPADIAQTVQEDLRTFSWASVTSKNLPPSGAVPVTGIPPHVVKVPASQPRPESKPESQIPPQRPQRDQRVREQRINIPPQRGPRPIREAGEQGDIEPRRMVRHPDSHQLFIGNLPHEVDKSELKDFFQSYGNVVELRINSGGKLPNFGFVVFDDSEPVQKVLSNRPIMFRGEVRLNVEEKKTRAAREGDRRDNRLRGPGGPRGGLGGGMRGPPRGGMVQKPGFGVGRGLAPRQ

SEQ ID NO: 1470 - protein, 638 aa, homo sapiens; identical to SEQ ID NO: 116

SEQ ID NO: 1471 - protein, 300 aa, homo sapiens [sequence omitted]

SEQ ID NO: 1472 - protein, 285 aa, homo sapiens
MTTLTHRARRTEISKNSEKKMESEEDSNWEKSPDNEDSGDSKDIRLTLMEEVLLLGLKDKEGYTSFWNDCISSGLRGGILIELAMRGRIYLEPPTMRKKRLLDRKVLLKSDSPTGDVLLDETLKHIKATEPTETVQTWIELLTGETWNPFKLQYQLRNVRERIAKNLVEKGILTTEKQNFLLFDMTTHPVTNTTEKQRLVKKLQDSVLERWVNDPQRMDKRTLALLVLAHSSDVLENVFSSLTDDKYDVAMNRAKDLVELDPEVEGTKPSATEMIWAVLAAFNKS

SEQ ID NO: 1473 - protein, 657 aa, homo sapiens; identical to SEQ ID NO: 121

SEQ ID NO: 1474 - protein, 2144 aa, homo sapiens
MTSLAQQLQRLALPQSDASLLSRDEVASLLFDPKEAATIDRDTAFAIGCTGLEELLGIDPSFEQFEAPLFSQLAKTLERSVQTKAVNKQLDENISLFLIHLSPYFLLKPAQKCLEWLIHRFHIHLYNQDSLIACVLPYHETRIFVRVIQLLKINNSKHRWFWLLPVKQSGVPLAKGTLITHCYKDLGFMDFICSLVTKSVKVFAEYPGSSAQLRVLLAFYASTIVSALVAAEDVSDNIIAKLFPYIQKGLKSSLPDYRAATYMIICQISVKVTMENTFVNSLASQIIKTLTKIPSLIKDGLSCLIVLLQRQKPESLGKKPFPHLCNVPDLITILHGISETYDVSPLLHYMLPHLVVSIIHHVTGEETEGMDGQIYKRHLEAILTKISLKNNLDHLLASLLFEEYISYSSQEEMDSNKVSLLNEQFLPLIRLLESKYPRTLDVVLEEHLKEIADLKKQELFHQFVSLSTSGGKYQFLADSDTSLMLSLNHPLAPVRILAMNHLKKIMKTSKEGVDESFIKEAVLARLGDDNIDVVLSAISAFEIFKEHFSSEVTISNLLNLFQRAELSKNGEWYEVLKIAADILIKEEILSENDQLSNQVVVCLLPFMVINNDDTESAEMKIAIYLSKSGICSLHPLLRGWEEALENVIKSTKPGKLIGVANQKMIELLADNINLGDPSSMLKMVEDLISVGEEESFNLKQKVTFHVILSVLVSCCSSLKETHFPFAIRVFSLLQKKIKKLESVITAVEIPSEWHIELMLDRGIPVELWAHYVEELNSTQRVAVEDSVFLVFSLKKFIYALKAPKSFPKGDIWWNPEQLKEDSRDYLHLLIGLFEMMLNGADAVHFRVLMKLFIKVHLEDVFQLFKFCSVLWTYGSSLSNPLNCSVKTVLQTQALYVGCAMLSSQKTQCKHQLASISSPVVTSLLINLGSPVKEVRRAAIQCLQALSGVASPFYLIIDHLISKAEEITSDAAYVIQDLATLFEELQREKKLKSHQKLSETLKNLLSCVYSCPSYIAKDLMKVLQGVNGEMVLSQLLPMAEQLLEKIQKEPTAVLKDEAMVLHLTLGKYNEFSVSLLNEDPKSLDIFIKAVHTTKELYAGMPTIQITALEKITKPFFAAISDEKVQQKLLRMLFDLLVNCKNSHCAQTVSSVFKGISVNAEQVRIELEPPDKAKPLGTVQQKRRQKMQQKKSQDLESVQEVGGSYWQRVTLILELLQHKKKLRSPQILVPTLFNLLSRCLEPLPQEQGNMEYTKQLILSCLLNICQKLSPDGGKIPKDILDEEKFNVELIVQCIRLSEMPQTHHHALLLLGTVAGIFPDKVLHNIMSIFTFMGANVMRLDDTYSFQVINKTVKMVIPALIQSDSGDSIEVSRNVEEIVVKIISVFVDALPHVPEHRRLPILVQLVDTLGAEKFLWILLILLFEQYVTKTVLAAAYGEKDAILEADTEFWFSVCCEFSVQHQIQSLMNILQYLLKLPEEKEETIPKAVSFNKSESQEEMLQVFNVETHTSKQLRHFKFLSVSFMSQLLSSNNFLKKVVESGGPEILKGLEERLLETVLGYISAVAQSMERNADKLTVKFWRALLSKAYDLLDKVNALLPTETFIPVIRGLVGNPLPSVRRKALDLLNNKLQQNISWKKTIVTRFLKLVPDLLAIVQRKKKEGEEEQAINRQTALYTLKLLCKNFGAENPDPFVPVLNTAVKLIAPERKEEKNVLGSALLCIAEVTSTLEALAIPQLPSLMPSLLTTMKNTSELVSSEVYLLSALAALQKVVETLPHFISPYLEGILSQVIHLEKITSEMGSASQANIRLTSLKKTLATTLAPRVLLPAIKKTYKQIEKNWKNHMGPFMSILQEHIGVMKKEELTSHQSQLTAFFLEALDFRAQHSENDLEEVGKTENCIIDCLVAMVVKLSEVTFRPLFFKLFDWAKTEDAPKDRLLTFYNLADCIAEKLKGLFTLFAGHLVKPFADTLNQVNISKTDEAFFDSENDPEKCCLLLQFILNCLYKIFLFDTQHFISKERAEALMMPLVDQLENRLGGEEKFQERVTKHLIPCIAQFSVAMADDSLWKPLNYQILLKTRDSSPKVRFAALITVLALAEKLKENYIVLLPESIPFLAELMEDECEEVEHQCQKTIQQLETVLGEPLQSYF

SEQ ID NO: 1475 - protein, 205 aa, homo sapiens
MAEPLQPDPGAAEDAAAQAVETPGWKAPEDAGPQPGSYEIRHYGPAKWVSTSVESMDWDSAIQTGFTKLNSYIQGKNEKEMKIKMTAPVTSYVEPGSGPFSESTITISLYIPSEQQFDPPRPLESDVFIEDRAEMTVFVRSFDGFSSAQKNQEQLLTLASILREDGKVFDEKVYYTAGYNSPVKLLNRNNEVWLIQKNEPTKENE

SEQ ID NO: 1476 - protein, 386 aa, homo sapiens
MGQREMWRLMSRFNAFKRTNTILHHLRMSKHTDAAEEVLLEKKGCTGVITLNRPKFLNALTLNMIRQIYPQLKKWEQDPETFLIIIKGAGGKAFCAGGDIRVISEAEKAKQKIAPVFFREEYMLNNAVGSCQKPYVALIHGITMGGGVGLSVHGQFRVATEKCLFAMPETAIGLFPDVGGGYFLPRLQGKLGYFLALTGFRLKGRDVYRAGIATHFVDSEKLAMLEEDLLALKSPSKENIASVLENYHTESKIDRDKSFILEEHMDKINSCFSANTVEEIIENLQQDGSSFALEQLKVINKMSPTSLKITLRQLMEGSSKTLQEVLTMEYRLSQACMRGHDFHEGVRAVLIDKDQSPKWKPADLKEVTEEDLNNHFKSLGSSDLKF

SEQ ID NO: 1477 - protein, 1009 aa, homo sapiens
MSWMFKRDPVWKYLQTVQYGVHGNFPRLSYPTFFPRFEFQDVIPPDDFLTSDEEVDSVLFGSLRGHVVGLRYYTGVVNNNEMVALQRDPNNPYDKNAIKVNNVNGNQVGHLKKELAGALAYIMDNKLAQIEGVVPFGANNAFTMPLHMTFWGKEENRKAVSDQLKKHGFKLGPAPKTLGFNLESGWGSGRAGPSYSMPVHAAVQMTTEQLKTEFDKLFEDLKEDDKTHEMEPAEAIETPLLPHQKQALAWMVSRENSKELPPFWEQRNDLYYNTITNFSEKDRPENVHGGILADDMGLGKTLTAIAVILTNFHDGRPLPIERVKKNLLKKEYNVNDDSMKLGGNNTSEKADGLSKDASRCSEQPSISDIKEKSKFRMSELSSSRPKRRKTAVQYIESSDSEEIETSELPQKMKGKLKNVQSETKGRAKAGSSKVIEDVAFACALTSSVPTTKKKMLKKGACAVEGSKKTDVEERPRTTLIICPLSVLSNWIDQFGQHIKSDVHLNFYVYYGPDRIREPALLSKQDIVLTTYNILTHDYGTKGDSPLHSIRWLRVILDEGHAIRNPNAQQTKAVLDLESERRWVLTGTPIQNSLKDLWSLLSFLKLKPFIDREWWHRTIQRPVTMGDEGGLRRLQSLIKNITLRRTKTSKIKGKPVLELPERKVFIQHITLSDEERKIYQSVKNEGRATIGRYFNEGTVLAHYADVLGLLLRLRQICCHTYLLTNAVSSNGPSGNDTPEELRKKLIRKMKLILSSGSDEECAICLDSLTVPVITHCAHVFCKPCICQVIQNEQPHAKCPLCRNDIHEDNLLECPPEELARDSEKKSDMEWTSSSKINALMHALTDLRKKNPNIKSLVVSQFTTFLSLIEIPLKASGFVFTRLDGSMAQKKRVESIQCFQNTEAGSPTIMLLSLKAGGVGLNLSAASRVFLMDPAWNPAAEDQCFDRCHRLGQKQEVIITKFIVKDSVEENMLKIQNKKRELAAGAFGTKKPNADEMKQAKINEIRTLIDL

SEQ ID NO: 1478 - protein, 390 aa, homo sapiens
MPDTNSTINLSLSTRVTLAFFMSLVAFAIMLGNALVILAFVVDKNLRHRSSYFFLNLAISDFFVGVISIPLYIPHTLFEWDFGKEICVFWLTTDYLLCTASVYNIVLISYDRYLSVSNAVSYRTQHTGVLKIVTLMVAVWVLAFLVNGPMILVSESWKDEGSECEPGFFSEWYILAITSFLEFVIPVILVAYFNMNIYWSLWKRDHLSRCQSHPGLTAVSSNICGHSFRGRLSSRRSLSASTEVPASFHSERQRRKSSLMFSSRTKMNSNTIASKMGSFSQSDSVALHQREHVELLRARRLAKSLAILLGVFAVCWAPYSLFTIVLSFYSSATGPKSVWYRIAFWLQWFNSFVNPLLYPLCHKRFQKAFLKIFCIKKQPLPSQHSRSVSS

SEQ ID NO: 1479 - protein, 1019 aa, homo sapiens [sequence omitted]

SEQ ID NO: 1480 - protein, 2491 aa, homo sapiens
MGAAAGRSPHLGPAPARRPQRSLLLLQLLLLVAAPGSTQAQAAPFPELCSYTWEAVDTKNNVLYKINICGSVDIVQCGPSSAVCMHDLKTRTYHSVGDSVLRSATRSLLEFNTTVSCDQQGTNHRVQSSIAFLCGKTLGTPEFVTATECVHYFEWRTTAACKKDIFKANKEVPCYVFDEELRKHDLNPLIKLSGAYLVDDSDPDTSLFINVCRDIDTLRDPGSQLRACPPGTAACLVRGHQAFDVGQPRDGLKLVRKDRLVLSYVREEAGKLDFCDGHSPAVTITFVCPSERREGTIPKLTAKSNCRYEIEWITEYACHRDYLESKTCSLSGEQQDVSIDLTPLAQSGGSSYISDGKEYLFYLNVCGETEIQFCNKKQAAVCQVKKSDTSQVKAAGRYHNQTLRYSDGDLTLIYFGGDECSSGFQRMSVINFECNKTAGNDGKGTPVFTGEVDCTYFFTWDTEYACVKEKEDLLCGATDGKKRYDLSALVRHAEPEQNWEAVDGSQTETEKKHFFINICHRVLQEGKARGCPEDAAVCAVDKNGSKNLGKFISSPMKEKGNIQLSYSDGDDCGHGKKIKTNITLVCKPGDLESAPVLRTSGEGGCFYEFEWHTAAACVLSKTEGENCTVFDSQAGFSFDLSPLTKKNGAYKVETKKYDFYINVCGPVSVSPCQPDSGACQVAKSDEKTWNLGLSNAKLSYYDGMIQLNYRGGTPYNNERHTPRATLITFLCDRDAGVGFPEYQEEDNSTYNFRWYTSYACPEEPLECVVTDPSTLEQYDLSSLAKSEGGLGGNWYAMDNSGEHVTWRKYYINVCRPLNPVPGCNRYASACQMKYEKDQGSFTEVVSISNLGMAKTGPVVEDSGSLLLEYVNGSACTTSDGRQTTYTTRIHLVCSRGRLNSHPIFSLNWECVVSFLWNTEAACPIQTTTDTDQACSIRDPNSGFVFNLNPLNSSQGYNVSGIGKIFMFNVCGTMPVCGTILGKPASGCEAETQTEELKNWKPARPVGIEKSLQLSTEGFITLTYKGPLSAKGTADAFIVRFVCNDDVYSGPLKFLHQDIDSGQGIRNTYFEFETALACVPSPVDCQVTDLAGNEYDLTGLSTVRKPWTAVDTSVDGRKRTFYLSVCNPLPYIPGCQGSAVGSCLVSEGNSWNLGVVQMSPQAAANGSLSIMYVNGDKCGNQRFSTRITFECAQISGSPAFQLQDGCEYVFIWRTVEACPVVRVEGDNCEVKDPRHGNLYDLKPLGLNDTIVSAGEYTYYFRVCGKLSSDVCPTSDKSKVVSSCQEKREPQGFHKVAGLLTQKLTYENGLLKMNFTGGDTCHKVYQRSTAIFFYCDRGTQRPVFLKETSDCSYLFEWRTQYACPPFDLTECSFKDGAGNSFDLSSLSRYSDNWEAITGTGDPEHYLINVCKSLAPQAGTEPCPPEAAACLLGGSKPVNLGRVRDGPQWRDGIIVLKYVDGDLCPDGIRKKSTTIRFTCSESQVNSRPMFISAVEDCEYTFAWPTATACPMKSNEHDDCQVTNPSTGHLFDLSSLSGRAGFTAAYSEKGLVYMSICGENENCPPGVGACFGQTRISVGKANKRLRYVDQVLQLVYKDGSPCPSKSGLSYKSVISFVCRPEARPTNRPMLISLDKQTCTLFFSWHTPLACEQATECSVRNGSSIVDLSPLIHRTGGYEAYDESEDDASDTNPDFYINICQPLNPMHGVPCPAGAAVCKVPIDGPPIDIGRVAGPPILNPIANEIYLNFESSTPCLADKHFNYTSLIAFHCKRGVSMGTPKLLRTSECDFVFEWETPVVCPDEVRMDGCTLTDEQLLYSFNLSSLSTSTFKVTRDSRTYSVGVCTFAVGPEQGGCKDGGVCLLSGTKGASFGRLQSMKLDYRHQDEAVVLSYVNGDRCPPETDDGVPCVFPFIFNGKSYEECIIESRAKLWCSTTADYDRDHEWGFCRHSNSYRTSSIIFKCDEDEDIGRPQVFSEVRGCDVTFEWKTKVVCPPKKLECKFVQKHKTYDLRLLSSLTGSWSLVHNGVSYYINLCQKIYKGPLGCSERASICRRTTTGDVQVLGLVHTQKLGVIGDKVVVTYSKGYPCGGNKTASSVIELTCTKTVGRPAFKRFDIDSCTYYFSWDSRAACAVKPQEVQMVNGTITNPINGKSFSLGDIYFKLFRASGDMRTNGDNYLYEIQLSSITSSRNPACSGANICQVKPNDQHFSRKVGTSDKTKYYLQDGDLDVVFASSSKCGKDKTKSVSSTIFFHCDPLVEDGIPEFSHETADCQYLFSWYTSAVCPLGVGFDSENPGDDGQMHKGLSERSQAVGAVLSLLLVALTCCLLALLLYKKERRETVISKLTTCCRRSSNVSYKYSKVNKEEETDENETEWLMEEIQLPPPRQGKEGQENGHITTKSVKALSSLHGDDQDSEDEVLTIPEVKVHSGRGAGAESSHPVRNAQSNALQEREDDRVGLVRGEKARKGKSSSAQQKTVSSTKLVSFHDDSDEDLLHI

SEQ ID NO: 1481 - protein, 1332 aa, homo sapiens
MRNLKLFRTLEFRDIQGPGNPQCFSLRTEQGTVLIGSEHGLIEVDPVSREVKNEVSLVAEGFLPEDGSGRIVGVQDLLDQESVCVATASGDVILCSLSTQQLECVGSVASGISVMSWSPDQELVLLATGQQTLIMMTKDFEPILEQQIHQDDFGESKFITVGWGRKETQFHGSEGRQAAFQMQMHESALPWDDHRPQVTWRGDGQFFAVSVVCPETGARKVRVWNREFALQSTSEPVAGLGPALAWKPSGSLIASTQDKPNQQDIVFFEKNGLLHGHFTLPFLKDEVKVNDLLWNADSSVLAVWLEDLQREESSIPKTCVQLWTVGNYHWYLKQSLSFSTCGKSKIVSLMWDPVTPYRLHVLCQGWHYLAYDWHWTTDRSVGDNSSDLSNVAVIDGNRVLVTVFRQTVVPPPMCTYQLLFPHPVNQVTFLAHPQKSNDLAVLDASNQISVYKCGDCPSADPTVKLGAVGGSGFKVCLRTPHLEKRYKIQFENNEDQDVNPLKLGLLTWIEEDVFLAVSHSEFSPRSVIHHLTAASSEMDEEHGQLNVSSSAAVDGVIISLCCNSKTKSVVLQLADGQIFKYLWESPSLAIKPWKNSGGFPVRFPYPCTQTELAMIGEEECVLGLTDRCRFFINDIEVASNITSFAVYDEFLLLTTHSHTCQCFCLRDASFKTLQAGLSSNHVSHGEVLRKVERGSRIVTVVPQDTKLVLQMPRGNLEVVHHRALVLAQIRKWLDKLMFKEAFECMRKLRINLNLIYDHNPKVFLGNVETFIKQIDSVNHINLFFTELKEEDVTKTMYPAPVTSSVYLSRDPDGNKIDLVCDAMRAVMESINPHKYCLSILTSHVKKTTPELEIVLQKVHELQGNAPSDPDAVSAEEALKYLLHLVDVNELYDHSLGTYDFDLVLMVAEKSQKDPKEYLPFLNTLKKMETNYQRFTIDKYLKRYEKAIGHLSKCGPEYFPECLNLIKDKNLYNEALKLYSPSSQQYQDISIAYGEHLMQEHMYEPAGLMFARCGAHEKALSAFLTCGNWKQALCVAAQLNFTKDQLVGLGRTLAGKLVEQRKHIDAAMVLEECAQDYEEAVLLLLEGAAWEEALRLVYKYNRLDIIETNVKPSILEAQKNYMAFLDSQTATFSRHKKRLLVVRELKEQAQQAGLDDEVPHGQESDLFSETSSVVSGSEMSGKYSHSNSRISARSSKNRRKAERKKHSLKEGSPLEDLALLEALSEVVQNTENLKDEVYHILKVLFLFEFDEQGRELQKAFEDTLQLMERSLPEIWTLTYQQNSATPVLGPNSTANSIMASYQQQKTSVPVLDAELFIPPKINRRTQWKLSLLD

SEQ ID NO: 1482 - protein, 1038 aa, homo sapiens
MDPNTIIEALRGTMDPALREAAERQLNEAHKSLNFVSTLLQITMSEQLDLPVRQAGVIYLKNMITQYWPDRETAPGDISPYTIPEEDRHCIRENIVEAIIHSPELIRVQLTTCIHHIIKHDYPSRWTAIVDKIGFYLQSDNSACWLGILLCLYQLVKNYEYKKPEERSPLVAAMQHFLPVLKDRFIQLLSDQSDQSVLIQKQIFKIFYALVQYTLPLELINQQNLTEWIEILKTVVNRDVPNETLQVEEDDRPELPWWKCKKWALHILARLFERYGSPGNVSKEYNEFAEVFLKAFAVGVQQVLLKVLYQYKEKQYMAPRVLQQTLNYINQGVSHALTWKNLKPHIQGIIQDVIFPLMCYTDADEELWQEDPYEYIRMKFDVFEDFISPTTAAQTLLFTACSKRKEVLQKTMGFCYQILTEPNADPRKKDGALHMIGSLAEILLKKKIYKDQMEYMLQNHVFPLFSSELGYMRARACWVLHYFCEVKFKSDQNLQTALELTRRCLIDDREMPVKVEAAIALQVLISNQEKAKEYITPFIRPVMQALLHIIRETENDDLTNVIQKMICEYSEEVTPIAVEMTQHLAMTFNQVIQTGPDEEGSDDKAVTAMGILNTIDTLLSVVEDHKEITQQLEGICLQVIGTVLQQHVLEFYEEIFSLAHSLTCQQVSPQMWQLLPLVFEVFQQDGFDYFTDMMPLLHNYVTVDTDTLLSDTKYLEMIYSMCKKVLTGVAGEDAECHAAKLLEVIILQCKGRGIDQCIPLFVEAALERLTREVKTSELRTMCLQVAIAALYYNPHLLLNTLENLRFPNNVEPVTNHFITQWLNDVDCFLGLHDRKMCVLGLCALIDMEQIPQVLNQVSGQILPAFILLFNGLKRAYACHAEHENDSDDDDEAEDDDETEELGSDEDDIDEDGQEYLEILAKQAGEDGDDEDWEEDDAEETALEGYSTIIDDEDNPVDEYQIFKAIFQTIQNRNPVWYQALTHGLNEEQRKQLQDIATLADQRRAAHESKMIEKHGGYKFSAPVVPSSFNFGGPAPGMN

SEQ ID NO: 1483 - protein, 598 aa, homo sapiens
MKPTGTDPRILSIAAEVAKSPEQNVPVILLKLKEIINITPLGSSELKKIKQDIYCYDLIQYCLLVLSQDYSRIQGGWTTISQLTQILSHCCVGLEPGEDAEEFYNELLPSAAENFLVLGRQLQTCFINAAKAEEKDELLHFFQIVTDSLFWLLGGHVELIQNVLQSDHFLHLLQADNVQIGSAVMMMLQNILQINSGDLLRIGRKALYSILDEVIFKLFSTPSPVIRSTATKLLLLMAESHQEILILLRQSTCYKGLRRLLSKQETGTEFSQELRQLVGLLSPMVYQEVEEQKLHQAACLIQAYWKGFQTRKRLKKLPSAVIALQRSFRSKRSKMLLEINRQKEEEDLKLQLQLQRQRAMRLSRELQLSMLEIVHPGQVEKHYREMEEKSALIIQKHWRGYRERKNFHQQRQSLIEYKAAVTLQRAALKFLAKCRKKKKLFAPWRGLQELTDARRVELKKRVDDYVRRHLGSPMSDVVSRELHAQAQERLQHYFMGRALEERAQQHREALIAQISTNVEQLMKAPSLKEAEGKEPELFLSRSRPVAAKAKQAHLTTLKHIQAPWWKKLGEESGDEIDVPKDELSIELENLFIGGTKPP

SEQ ID NO: 1484 - protein, 963 aa, homo sapiens; identical to SEQ ID NO: 742

SEQ ID NO: 1485 - protein, 381 aa, homo sapiens
MSRHEGVSCDACLKGNFRGRRYKCLICYDYDLCASCYESGATTTRHTTDHPMQCILTRVDFDLYYGGEAFSVEQPQSFTCPYCGKMGYTETSLQEHVTSEHAETSTEVICPICAALPGGDPNHVTDDFAAHLTLEHRAPRDLDESSGVRHVRRMFHPGRGLGGPRARRSNMHFTSSSTGGLSSSQSSYSPSNREAMDPIAELLSQLSGVRRSAGGQLNSSGPSASQLQQLQMQLQLERQHAQAARQQLETARNATRRTNTSSVTTTITQSTATTNIANTESSQQTLQNSQFLLTRLNDPKMSETERQSMESERADRSLFVQELLLSTLVREESSSSDEDDRGEMADFGAMGCVDIMPLDVALENLNLKESNKGNEPPPPPL

SEQ ID NO: 1486 - protein, 583 aa, homo sapiens
MTFYLFGIRSFPKLWKSPYLGLGPGHSYVSLFLADRCGIRNQQRLFSLKTMSPQNTKATNLIAKARYLRKDEGSNKQVYSVPHFFLAGAAKERSQMNSQTEDHALAPVRNTIQLPTQPLNSEEWDKLKEDLKENTGKTSFESWIISQMAGCHSSIDVAKSLLAWVAAKNNGIVSYDLLVKYLYLCVFHMQTSEVIDVFEIMKARYKTLEPRGYSLLIRGLIHSDRWREALLLLEDIKKVITPSKKNYNDCIQGALLHQDVNTAWNLYQELLGHDIVPMLETLKAFFDFGKDIKDDNYSNKLLDILSYLRNNQLYPGESFAHSIKTWFESVPGKQWKGQFTTVRKSGQCSGCGKTIESIQLSPEEYECLKGKIMRDVIDGGDQYRKTTPQELKRFENFIKSRPPFDVVIDGLNVAKMFPKVRESQLLLNVVSQLAKRNLRLLVLGRKHMLRRSSQWSRDEMEEVQKQASCFFADDISEDDPFLLYATLHSGNHCRFITRDLMRDHKACLPDAKTQRLFFKWQQGHQLAIVNRFPGSKLTFQRILSYDTVVQTTGDSWHIPYDEDLVERCSCEVPTKWLCLHQKT

SEQ ID NO: 1487 - protein, 609 aa, homo sapiens
MEGKPMRRCTNIRPGETGMDVTSRCTLGDPNKLPEGVPQPARMPYISDKHPRQTLEVINLLRKHRELCDVVLVVGAKKIYAHRVILSACSPYFRAMFTGELAESRQTEVVIRDIDERAMELLIDFAYTSQITVEEGNVQTLLPAACLLQLAEIQEACCEFLKRQLDPSNCLGIRAFADTHSCRELLRIADKFTQHNFQEVMESEEFMLLPANQLIDIISSDELNVRSEEQVFNAVMAWVKYSIQERRPQLPQVLQHVRLPLLSPKFLVGTVGSDPLIKSDEECRDLVDEAKNYLLLPQERPLMQGPRTRPRKPIRCGEVLFAVGGWCSGDAISSVERYDPQTNEWRMVASMSKRRCGVGVSVLDDLLYAVGGHDGSSYLNSVERYDPKTNQWSSDVAPTSTCRTSVGVAVLGGFLYAVGGQDGVSCLNIVERYDPKENKWTRVASMSTRRLGVAVAVLGGFLYAVGGSDGTSPLNTVERYNPQENRWHTIAPMGTRRKHLGCAVYQDMIYAVGGRDDTTELSSAERYNPRTNQWSPVVAMTSRRSGVGLAVVNGQLMAVGGFDGTTYLKTIEVFDPDANTWRLYGGMNYRRLGGGVGVIKMTHCESHIW

SEQ ID NO: 1488 - protein, 600 aa, homo sapiens
MVLILGRRLNREDLGVRDSPATKRKVFEMDPKSLTGHEFFDFSSGSSHAENILQIFNEFRDSRLFTDVIICVEGKEFPCHRAVLSACSSYFRAMFCNDHRESREMLVEINGILAEAMECFLQYVYTGKVKITTENVQYLFETSSLFQISVLRDACAKFLEEQLDPCNCLGIQRFADTHSLKTLFTKCKNFALQTFEDVSQHEEFLELDKDELIDYICSDELVIGKEEMVFEAVMRWVYRAVDLRRPLLHELLTHVRLPLLHPNYFVQTVEVDQLIQNSPECYQLLHEARRYHILGNEMMSPRTRPRRSTGYSEVIVVVGGCERVGGFNLPYTECYDPVTGEWKSLAKLPEFTKSEYAVCALRNDILVSGGRINSRDVWIYNSQLNIWIRVASLNKGRWRHKMAVLLGKVYVVGGYDGQNRLSSVECYDSFSNRWTEVAPLKEAVSSPAVTSCVGKLFVIGGGPDDNTCSDKVQSYDPETNSWLLRAAIPIAKRCITAVSLNNLIYVAGGLTKAIYCYDPVEDYWMHVQNTFSRQENCGMSVCNGKIYILGGRRENGEATDTILCYDPATSIITGVAAMPRPVSYHGCVTIHRYNEKCFKL

SEQ ID NO: 1489 - protein, 736 aa, homo sapiens
MGNPENIEDAYVAVIRPKNTASLNSREYRAKSYEILLHEVPIEGQKKKRKKVLLETKLQGNSEITQGILDYVVETTKPISPANQGIRGKRVVLMKKFPLDGEKMGREASLFIVPSVVKDNTKYTYTPGCPIFYCLQDIMRVCSESSTHFATLTARMLIALDKWLDERHAQSHFIPALFRPSPLERIKTNVINPAYATESGQTENSLHMGYSALEIKSKMLALEKADTCIYNPLFGSDLQYTNRVDKVVINPYFGLGAPDYSKIQIPKQEKWQRSMSSVTEDKERQWVDDFPLHRSACEGDSELLSRLLSERFSVNQLDSDHWAPIHYACWYGKVEATRILLEKGKCNPNLLNGQLSSPLHFAAGGGHAEIVQILLNHPETDRHITDQQGRSPLNICEENKQNNWEEAAKLLKEAINKPYEKVRIYRMDGSYRSVELKHGNNTTVQQIMEGMRLSQETQQYFTIWICSENLSLQLKPYHKPLQHVRDWPEILAELTNLDPQRETPQLFLRRDVRLPLEVEKQIEDPLAILILFDEARYNLLKGFYTAPDAKLITLASLLLQIVYGNYESKKHKQGFLNEENLKSIVPVTKLKSKAPHWTNRILHEYKNLSTSEGVSKEMHHLQRMFLQNCWEIPTYGAAFFTGQIFTKASPSNHKVIPVYVGVNIKGLHLLNMETKALLISLKYGCFMWQLGDTDTCFQIHSMENKMSFIVHTKQAGLVVKLLMKLNGQLMPTERNS

SEQ ID NO: 1490 - protein, 399 aa, homo sapiens
MAQRAFPNPYADYNKSLAEGYFDAAGRLTPEFSQRLTNKIRELLQQMERGLKSADPRDGTGYTGWAGIAVLYLHLYDVFGDPAYLQLAHGYVKQSLNCLTKRSITFLCGDAGPLAVAAVLYHKMNNEKQAEDCITRLIHLNKIDPHAPNEMLYGRIGYIYALLFVNKNFGVEKIPQSHIQQICETILTSGENLARKRNFTAKSPLMYEWYQEYYVGAAHGLAGIYYYLMQPSLQVSQGKLHSLVKPSVDYVCQLKFPSGNYPPCIGDNRDLLVHWCHGAPGVIYMLIQAYKVFREEKYLCDAYQCADVIWQYGLLKKGYGLCHGSAGNAYAFLTLYNLTQDMKYLYRACKFAEWCLEYGEHGCRTPDTPFSLFEGMAGTIYFLADLLVPTKARFPAFEL

SEQ ID NO: 1491 - protein, 1019 aa, homo sapiens
MLWRVLLSKRPPFPHPELDFQEAPIPSCPGRLPGRKNSVALAAAPRKEPTGDREKPLPFPVLAPFSNPEHSAPAKVVRAAVPKQRKGSKVGDFGDAINWPTPGEIAHKSVQPQSHKPQPTRKLPPKKDMKEQEKGEGSDSKESPKTKSDESGEEKNGDEDCQRGGQKKKGNKHKWVPLQIDMKPEVPREKLASRPTRPPEPRHIPANRGEIKGSESATYVPVAPPTPAWQPEIKPEPAWHDQDETSSVKSDGAGGARASFRGRGRGRGRGRGRGRGGTRTHFDYQFGYRKFDGVEGPRTPKYMNNITYYFDNVSSTELYSVDQELLKDYIKRQIEYYFSVDNLERDFFLRRKMDADGFLPITLIASFHRVQALTTDISLIFAALKDSKVVEIVDEKVRRREEPEKWPLPPIVDYSQTDFSQLLNCPEFVPRQHYQKETESAPGSPRAVTPVPTKTEEVSNLKTLPKGLSASLPDLDSENWIEVKKRPRPSPARPKKSEESRFSHLTSLPQQLPSQQLMSKDQDEQEELDFLFDEEMEQMDGRKNTFTAWSDEESDYEIDDRDVNKILIVTQTPHYMRRHPGGDRTGNHTSRAKMSAELAKVINDGLFYYEQDLWAEKFEPEYSQIKQEVENFKKVNMISREQFDTLTPEPPVDPNQEVPPGPPRFQQVPTDALANKLFGAPEPSTIARSLPTTVPESPNYRNTRTPRTPRTPQLKDSSQTSRFYPVVKEGRTLDAKMPRKRKTRHSSNPPLESHVGWVMDSREHRPRTASISSSPSEGTPTVGSYGCTPQSLPKFQHPSHELLKENGFTQHVYHKYRRRCLNERKRLGIGQSQEMNTLFRFWSFFLRDHFNKKMYEEFKQLALEDAKEGYRYGLECLFRYYSYGLEKKFRLDIFKDFQEETVKDYEAGQLYGLEKFWAFLKYSKAKNLDIDPKLQEYLGKFRRLEDFRVDPPMGEEGNHKRHSVVAGGGGGEGRKRCPSQSSSRPAAMISQPPTPPTGQPVREDAKWTSQHSNTQTLGK

SEQ ID NO: 1492 - protein, 724 aa, homo sapiens
MLLFVEQVASKGTGLNPNAKVWQEIAPGNTDATPVTHGTESSWHEIAATSGAHPEGNAELSEDICKEYEVMYSSSCETTRNTTGIEESTDGMILGPEDLSYQIYDVSGESNSAVSTEDLKECLKKQLEFCFSRENLSKDLYLISQMDSDQFIPIWTVANMEEIKKLTTDPDLILEVLRSSPMVQVDEKGEKVRPSHKRCIVILREIPETTPIEEVKGLFKSENCPKVISCEFAHNSNWYITFQSDTDAQQAFKYLREEVKTFQGKPIMARIKAINTFFAKNGYRLMDSSIYSHPIQTQAQYASPVFMQPVYNPHQQYSVYSIVPQSWSPNPTPYFETPLAPFPNGSFVNGFNSPGSYKTNAAAMNMGRPFQKNRVKPQFRSSGGSEHSTEGSVSLGDGQLNRYSSRNFPAERHNPTVTGHQEQTYLQKETSTLQVEQNGDYGRGRRTLFRGRRRREDDRISRPHPSTAESKAPTPKFDLLASNFPPLPGSSSRMPGELVLENRMSDVVKGVYKEKDNEELTISCPVPADEQTECTSAQQLNMSTSSPCAAELTALSTTQQEKDLIEDSSVQKDGLNQTTIPVSPPSTTKPSRASTASPCNNNINAATAVALQEPRKLSYAEVCQKPPKEPSSVLVQPLRELRSNVVSPTKNEDNGAPENSVEKPHEKPEARASKDYSGFRGNIIPRGAAGKIREQRRQFSHRAIPQGVTRRNGKEQYVPPRSPK

SEQ ID NO: 1493 - protein, 858 aa, homo sapiens
MFTLAEVASLNDIQPTYRILKPWWDVFMDYLAVVMLMVAIFAGTMQLTKDQVVCLPVLPSPVNSKAHTPPGNAEVTTNIPKMEAATNQDQDGRTTNDISFGTSAVTPDIPLRATYPRTDFALPNQEAKKEKKDPTGRKTNLDFQQYVFINQMCYHLALPWYSKYFPYLALIHTIILMVSSNFWFKYPKTCSKVEHFVSILGKCFESPWTTKALSETACEDSEENKQRITGAQTLPKHVSTSSDEGSPSASTPMINKTGFKFSAEKPVIEVPSMTILDKKDGEQAKALFEKVRKFRAHVEDSDLIYKLYVVQTVIKTAKFIFILCYTANFVNAISFEHVCKPKVEHLIGYEVFECTHNMAYMLKKLLISYISIICVYGFICLYTLFWLFRIPLKEYSFEKVREESSFSDIPDVKNDFAFLLHMVDQYDQLYSKRFGVFLSEVSENKLREISLNHEWTFEKLRQHISRNAQDKQELHLFMLSGVPDAVFDLTDLDVLKLELIPEAKIPAKISQMTNLQELHLCHCPAKVEQTAFSFLRDHLRCLHVKFTDVAEIPAWVYLLKNLRELYLIGNLNSENNKMIGLESLRELRHLKILHVKSNLTKVPSNITDVAPHLTKLVIHNDGTKLLVLNSLKKMMNVAELELQNCELERIPHAIFSLSNLQELDLKSNNIRTIEEIISFQHLKRLTCLKLWHNKIVTIPPSITHVKNLESLYFSNNKLESLPVAVFSLQKLRCLDVSYNNISMIPIEIGLLQNLQHLHITGNKVDILPKQLFKCIKLRTLNLGQNCITSLPEKVGQLSQLTQLELKGNCLDRLPAQLGQCRMLKKSGLVVEDHLFDTLPLEVKEALNQDINIPFANGI

SEQ ID NO: 1494 - protein, 5430 aa, homo sapiens
MSSSDEETLSERSCRSERSCRSERSYRSERSGSLSPCPPGDTLPWNLPLHEQKKRKSQDSVLDPAERAVVRVADERDRVQKKTFTKWVNKHLMKVRKHINDLYEDLRDGHNLISLLEVLSGIKLPREKGRMRFHRLQNVQIALDFLKQRQVKLVNIRNDDITDGNPKLTLGLIWTIILHFQISDIYISGESGDMSAKEKLLLWTQKVTAGYTGIKCTNFSSCWSDGKMFNALIHRYRPDLVDMERVQIQSNRENLEQAFEVAERLGVTRLLDAEDVDVPSPDEKSVITYVSSIYDAFPKVPEGGEGISATEVDSRWQEYQSRVDSLIPWIKQHTILMSDKTFPQNPVELKALYNQYIHFKETEILAKEREKGRIEELYKLLEVWIEFGRIKLPQGYHPNDVEEEWGKLIIEMLEREKSLRPAVERLELLLQIANKIQNGALNCEEKLTLAKNTLQADAAHLESGQPVQCESDVIMYIQECEGLIRQLQVDLQILRDENYYQLEELAFRVMRLQDELVTLRLECTNLYRKGHFTSLELVPPSTLTTTHLKAEPLTKATHSSSTSWFRKPMTRAELVAISSSEDEGNLRFVYELLSWVEEMQMKLERAEWGNDLPSVELQLETQQHIHTSVEELGSSVKEARLYEGKMSQNFHTSYAETLGKLETQYCKLKETSSFRMRHLQSLHKFVSRATAELIWLNEKEEEELAYDWSDNNSNISAKRNYFSELTMELEEKQDVFRSLQDTAELLSLENHPAKQTVEAYSAAVQSQLQWMKQLCLCVEQHVKENTAYFQFFSDARELESFLRNLQDSIKRKYSCDHNTSLSRLEDLLQDSMDEKEQLIQSKSSVASLVGRSKTIVQLKPRSPDHVLKNTISVKAVCDYRQIEITICKNDECVLEDNSQRTKWKVISPTGNEAMVPSVCFLIPPPNKDAIEMASRVEQSYQKVMALWHQLHVNTKSLISWNYLRKDLDLVQTWNLEKLRSSAPGECHQIMKNLQAHYEDFLQDSRDSVLFSVADRLRLEEEVEACKARFQHLMKSMENEDKEETVAKMYISELKNIRLRLEEYEQRVVKRIQSLASSRTDRDAWQDNALRIAEQEHTQEDLQQLRSDLDAVSMKCDSFLHQSPSSSSVPTLRSELNLLVEKMDHVYGLSTVYLNKLKTVDVIVRSIQDAELLVKGYEIKLSQEEVVLADLSALEAHWSTLRHWLSDVKDKNSVFSVLDEEIAKAKVVAEQMSRLTPERNLDLERYQEKGSQLQERWHRVIAQLEIRQSELESIQEVLGDYRACHGTLIKWIEETTAQQEMMKPGQAEDSRVLSEQLSQQTALFAEIERNQTKLDQCQKFSQQYSTIVKDYELQLMTYKAFVESQQKSPGKRRRMLSSSDAITQEFMDLRTRYTALVTLTTQHVKYISDALRRLEEEEKVVEEEKQEHVEKVKELLGWVSTLARNTQGKATSSETKESTDIEKAILEQQVLSEELTTKKEQVSEAIKTSQIFLAKHGHKLSEKEKKQISEQLNALNKAYHDLCDGSANQLQQLQSQLAHQTEQKTLQKQQNTCHQQLEDLCSWVGQAERALAGHQGRTTQQDLSALQKNQSDLKDLQDDIQNRATSFATVVKDIEGFMEENQTKLSPRELTALREKLHQAKEQYEALQEETRVAQKELEEAVTSALQQETEKSKAAKELAENKKKIDALLDWVTSVGSSGGQLLTNLPGMEQLSGASLEKGALDTTDGYMGVNQAPEKLDKQCEMMKARHQELLSQQQNFILATQSAQAFLDQHGHNLTPEEQQMLQQKLGELKEQYSTSLAQSEAELKQVQTLQDELQKFLQDHKEFESWLERSEKELENMHKGGSSPETLPSLLKRQGSFSEDVISHKGDLRFVTISGQKVLDMENSFKEGKEPSEIGNLVKDKLKDATERYTALHSKCTRLGSHLNMLLGQYHQFQNSADSLQAWMQACEANVEKLLSDTVASDPGVLQEQLATTKQLQEELAEHQVPVEKLQKVARDIMEIEGEPAPDHRHVQETTDSILSHFQSLSYSLAERSSLLQKAIAQSQSVQESLESLLQSIGEVEQNLEGKQVSSLSSGVIQEALATNMKLKQDIARQKSSLEATREMVTRFMETADSTTAAVLQGKLAEVSQRFEQLCLQQQEKESSLKKLLPQAEMFEHLSGKLQQFMENKSRMLASGNQPDQDITHFFQQIQELNLEMEDQQENLDTLEHLVTELSSCGFALDLCQHQDRVQNLRKDFTELQKTVKEREKDASSCQEQLDEFRKLVRTFQKWLKETEGSIPPTETSMSAKELEKQIEHLKSLLDDWASKGTLVEEINCKGTSLENLIMEITAPDSQGKTGSILPSVGSSVGSVNGYHTCKDLTEIQCDMSDVNLKYEKLGGVLHERQESLQAILNRMEEVHKEANSVLQWLESKEEVLKSMDAMSSPTKTETVKAQAESNKAFLAELEQNSPKIQKVKEALAGLLVTYPNSQEAENWKKIQEELNSRWERATEVTVARQRQLEESASHLACFQAAESQLRPWLMEKELMMGVLGPLSIDPNMLNAQKQQVQFMLKEFEARRQQHEQLNEAAQGILTGPGDVSLSTSQVQKELQSINQKWVELTDKLNSRSSQIDQAIVKSTQYQELLQDLSEKVRAVGQRLSVQSAISTQPEAVKQQLEETSEIRSDLEQLDHEVKEAQTLCDELSVLIGEQYLKDELKKRLETVALPLQGLEDLAADRINRLQAALASTQQFQQMFDELRTWLDDKQSQQAKNCPISAKLERLQSQLQENEEFQKSLNQHSGSYEVIVAEGESLLLSVPPGEEKRTLQNQLVELKNHWEELSKKTADRQSRLKDCMQKAQKYQWHVEDLVPWIEDCKAKMSELRVTLDPVQLESSLLRSKAMLNEVEKRRSLLEILNSAADILINSSEADEDGIRDEKAGINQNMDAVTEELQAKTGSLEEMTQRLREFQESFKNIEKKVEGAKHQLEIFDALGSQACSNKNLEKLRAQQEVLQALEPQVDYLRNFTQGLVEDAPDGSDASQLLHQAEVAQQEFLEVKQRVNSGCVMMENKLEGIGQFHCRVREMFSQLADLDDELDGMGAIGRDTDSLQSQIEDVRLFLNKIHVLKLDIEASEAECRHMLEEEGTLDLLGLKRELEALNKQCGKLTERGKARQEQLELTLGRVEDFYRKLKGLNDATTAAEEAEALQWVVGTEVEIINQQLADFKMFQKEQVDPLQMKLQQVNGLGQGLIQSAGKDCDVQGLEHDMEEINARWNTLNKKVAQRIAQLQEALLHCGKFQDALEPLLSWLADTEELIANQKPPSAEYKVVKAQIQEQKLLQRLLDDRKATVDMLQAEGGRIAQSAELADREKITGQLESLESRWTELLSKAAARQKQLEDILVLAKQFHETAEPISDFLSVTEKKLANSEPVGTQTAKIQQQIIRHKALEEDIENHATDVHQAVKIGQSLSSLTSPAEQGVLSEKIDSLQARYSEIQDRCCRKAALLDQALSNARLFGEDEVEVLNWLAEVEDKLSSVFVKDFKQDVLHRQHADHLALNEEIVNRKKNVDQAIKNGQALLKQTTGEEVLLIQEKLDGIKTRYADITVTSSKALRTLEQARQLATKFQSTYEELTGWLREVEEELATSGGQSPTGEQIPQFQQRQKELKKEVMEHRLVLDTVNEVSRALLELVPWRAREGLDKLVSDANEQYKLVSDTIGQRVDEIDAAIQRSQQYEQAADAELAWVAETKRKLMALGPIRLEQDQTTAQLQVQKAFSIDIIRHKDSMDELFSHRSEIFGTCGEEQKTVLQEKTESLIQQYEAISLLNSERYARLERAQVLVNQFWETYEELSPWIEETRALIAQLPSPAIDHEQLRQQQEEMRQLRESIAEHKPHIDKLLKIGPQLKELNPEEGEMVEEKYQKAENMYAQIKEEVRQRALALDEAVSQSTQITEFHDKIEPMLETLENLSSRLRMPPLIPAEVDKIRECISDNKSATVELEKLQPSFEALKRRGEELIGRSQGADKDLAAKEIQDKLDQMVFFWEDIKARAEEREIKFLDVLELAEKFWYDMAALLTTIKDTQDIVHDLESPGIDPSIIKQQVEAAETIKEETDGLHEELEFIRILGADLIFACGETEKPEVRKSIDEMNNAWENLNKTWKERLEKLEDAMQAAVQYQDTLQAMFDWLDNTVIKLCTMPPVGTDLNTVKDQLNEMKEFKVEVYQQQIEMEKLNHQGELMLKKATDETDRDIIREPLTELKHLWENLGEKIAHRQHKLEGALLALGQFQHALEELMSWLTHTEELLDAQRPISGDPKVIEVELAKHHVLKNDVLAHQATVETVNKAGNELLESSAGDDASSLRSRLEAMNQCWESVLQKTEEREQQLQSTLQQAQGFHSEIEDFLLELTRMESQLSASKPTGGLPETAREQLDTHMELYSQLKAKEETYNQLLDKGRLMLLSRDDSGSGSKTEQSVALLEQKWHVVSSKMEERKSKLEEALNLATEFQNSLQEFINWLTLAEQSLNIASPPSLILNTVLSQIEEHKVFANEVNAHRDQIIELDQTGNQLKFLSQKQDVVLIKNLLVSVQSRWEKVVQRSIERGRSLDDARKRAKQFHEAWKKLIDWLEDAESHLDSELEISNDPDKIKLQLSKHKEFQKTLGGKQPVYDTTIRTGRALKEKTLLPEDSQKLDNFLGEVRDKWDTVCGKSVERQHKLEEALLFSGQFMDALQALVDWLYKVEPQLAEDQPVHGDLDLVMNLMDAHKVFQKELGKRTGTVQVLKRSGRELIENSRDDTTWVKGQLQELSTRWDTVCKLSVSKQSRLEQALKQAEVFRDTVHMLLEWLSEAEQTLRFRGALPDDTEALQSLIDTHKEFMKKVEEKRVDVNSAVAMGEVILAVCHPDCITTIKHWITIIRARFEEVLTWAKQHQQRLETALSELVANAELLEELLAWIQWAETTLIQRDQEPIPQNIDRVKALIAEHQTFMEEMTRKQPDVDRVTKTYKRKNIEPTHAPFIEKSRSGGRKSLSQPTPPPMPILSQSEAKNPRINQLSARWQQVWLLALERQRKLNDALDRLEELKEFANFDFDVWRKKYMRWMNHKKSRVMDFFRRIDKDQDGKITRQEFIDGILASKFPTTKLEMTAVADIFDRDGDGYIDYYEFVAALHPNKDAYRPTTDADKIEDEVTRQVAQCKCAKRFQVEQIGENKYRFGDSQQLRLVRILRSTVMVRVGGGWMALDEFLVKNDPCRARGRTNIELREKFILPEGASQGMTPFRSRGRRSKPSSRAASPTRSSSSASQSNHSCTSMPSSPATPASGTKVIPSSGSKLKRPTPTFHSSRTSLAGDTSNSSSPASTGAKTNRADPKKSASRPGSRAGSRAGSRASSRRGSDASDFDLLETQSACSDTSESSAAGGQGNSRRGLNKPSKIPTMSKKTTTASPRTPGPKR

SEQ ID NO: 1495 - protein, 462 aa, homo sapiens
MAKFRRRTCIILALFILFIFSLMMGLKMLRPNTATFGAPFGLDLLPELHQRTIHLGKNFDFQKSDRINSETNTKNLKSVEITMKPSKASELNLDELPPLNNYLHVFYYSWYGNPQFDGKYIHWNHPVLEHWDPRIAKNYPQGRHNPPDDIGSSFYPELGSYSSRDPSVIETHMRQMRSASIGVLALSWYPPDVNDENGEPTDNLVPTILDKAHKYNLKVTFHIEPYSNRDDQNMYKNVKYIIDKYGNHPAFYRYKTKTGNALPMFYVYDSYITKPEKWANLLTTSGSRSIRNSPYDGLFIALLVEEKHKYDILQSGFDGIYTYFATNGFTYGSSHQNWASLKLFCDKYNLIFIPSVGPGYIDTSIRPWNTQNTRNRINGKYYEIGLSAALQTRPSLISITSFNEWHEGTQIEKAVPKRTSNTVYLDYRPHKPGLYLELTRKWSEKYSKERATYALDRQLPVS

SEQ ID NO: 1496 - protein, 334 aa, homo sapiens
MSEPIRVLVTGAAGQIAYSLLYSIGNGSVFGKDQPIILVLLDITPMMGVLDGVLMELQDCALPLLKDVIATDKEDVAFKDLDVAILVGSMPRREGMERKDLLKANVKIFKSQGAALDKYAKKSVKVIVVGNPANTNCLTASKSAPSIPKENFSCLTRLDHNRAKAQIALKLGVTANDVKNVIIWGNHSSTQYPDVNHAKVKLQGKEVGVYEALKDDSWLKGEFVTTVQQRGAAVIKARKLSSAMSAAKAICDHVRDIWFGTPEGEFVSMGVISDGNSYGVPDDLLYSFPVVIKNKTWKFVEGLPINDFSREKMDLTAKELTEEKESAFEFLSSA

SEQ ID NO: 1497 - protein, 209 aa, homo sapiens
MKKVRLKELESRLQQVDGFEKPKLLLEQYPTRPHIAACMLYTIHNTYDDIENKVVADLGCGCGVLSIGTAMLGAGLCVGFDIDEDALEIFNRNAEEFELTNIDMVQCDVCLLSNRMSKSFDTVIMNPPFGTKNNKGTDMAFLKTALEMARTAVYSLHKSSTREHVQKKAAEWKIKIDIIAELRYDLPASYKFHKKKSVDIEVDLIRFSF

SEQ ID NO: 1498 - protein, 1027 aa, homo sapiens; identical to SEQ ID NO: 1206

SEQ ID NO: 1499 - protein, 201 aa, homo sapiens
MAARTAFGAVCRRLWQGLGNFSVNTSKGNTAKNGGLLLSTNMKWVQFSNLHVDVPKDLTKPVVTISDEPDILYKRLSVLVKGHDKAVLDSYEYFAVLAAKELGISIKVHEPPRKIERFTLLQSVHIYKKHRVQYEMRTLYRCLELEHLTGSTADVYLEYIQRNLPEGVAMEVTKTQLEQLPEHIKEPIWETLSEEKEESKS

SEQ ID NO: 1500 - protein, 692 aa, homo sapiens
MFYFRGCGRWVAVSFTKQQFPLARLSSDSAAPRTPHFDVIVIGGGHAGTEAATAAARCGSRTLLLTHRVDTIGQMSCNPSFGGIGKGHLMREVDALDGLCSRICDQSGVHYKVLNRRKGPAVWGLRAQIDRKLYKQNMQKEILNTPLLTVQEGAVEDLILTEPEPEHTGKCRVSGVVLVDGSTVYAESVILTTGTFLRGMIVIGLETHPAGRLGDQPSIGLAQTLEKLGFVVGRLKTGTPPRIAKESINFSILNKHIPDNPSIPFSFTNETVWIKPEDQLPCYLTHTNPRVDEIVLKNLHLNSHVKETTRGPRYCPSIESKVLRFPNRLHQVWLEPEGMDSDLIYPQGLSMTLPAELQEKMITCIRGLEKAKVIQPGYGVQYDYLDPRQITPSLETHLVQRLFFAGQINGTTGYEEAAAQGVIAGINASLRVSRKPPFVVSRTEGYIGVLIDDLTTLGTSEPYRMFTSRVEFRLSLRPDNADSRLTLRGYKDAGCVSQQRYERACWMKSSLEEGISVLKSIEFLSSKWKKLIPEASISTSRSLPVRALDVLKYEEVDMDSLAKAVPEPLKKYTKCRELAERLKIEATYESVLFHQLQEIKGVQQDEALQLPKDLDYLTIRDVSLSHEVREKLHFSRPQTIGAASRIPGVTPAAIINLLRFVKTTQRRQSAMNESSKTDQYLCDADRLQEREL

SEQ ID NO: 1501 - protein, 698 aa, homo sapiens
MRRFLLLYATQQGQAKAIAEEICEQAVVHGFSADLHCISESDKYDLKTETAPLVVVVSTTGTGDPPDTARKFVKEIQNQTLPVDFFAHLRYGLLGLGDSEYTYFCNGGKIIDKRLQELGARHFYDTGHADDCVGLELVVEPWIAGLWPALRKHFRSSRGQEEISGALPVASPASSRTDLVKSELLHIESQVELLRFDDSGRKDSEVLKQNAVNSNQSNVVIEDFESSLTRSVPPLSQASLNIPGLPPEYLQVHLQESLGQEESQVSVTSADPVFQVPISKAVQLTTNDAIKTTLLVELDISNTDFSYQPGDAFSVICPNSDSEVQSLLQRLQLEDKREHCVLLKIKADTKKKGATLPQHIPAGCSLQFIFTWCLEIRAIPKKAFLRALVDYTSDSAEKRRLQELCSKQGAADYSRFVRDACACLLDLLLAFPSCQPPLSLLLEHLPKLQPRPYSCASSSLFHPGKLHFVFNIVEFLSTATTEVLRKGVCTGWLALLVASVLQPNIHASHEDSGKALAPKISISPRTTNSFHLPDDPSIPIIMVGPGTGIAPFIGFLQHREKLQEQHPDGNFGAMWLFFGCRHKDRDYLFRKELRHFLKHGILTHLKVSFSRDAPVGEEEAPAKYVQDNIQLHGQQVARILLQENGHIYVCGDAKNMAKDVHDALVQIISKEVGVEKLEAMKTLATLKEEKRYLQDIWS

SEQ ID NO: 1502 - protein, 221 aa, homo sapiens
MAAAVRMNIQMLLEAADYLERREREAEHGYASMLPYNNKDRDALKRRNKSKKNNSSSRSTHNEMEKNRRAHLRLCLEKLKGLVPLGPESSRHTTLSLLTKAKLHIKKLEDCDRKAVHQIDQLQREQRHLKRQLEKLGIERIRMDSIGSTVSSERSDSDREEIDVDVESTDYLTGDLDWSSSSVSDSDERGSMQSLGSDEGYSSTSIKRIKLQDSHKACLGL

SEQ ID NO: 1503 - protein, 1960 aa, homo sapiens
MAQQAADKYLYVDKNFINNPLAQADWAAKKLVWVPSDKSGFEPASLKEEVGEEAIVELVENGKKVKVNKDDIQKMNPPKFSKVEDMAELTCLNEASVLHNLKERYYSGLIYTYSGLFCVVINPYKNLPIYSEEIVEMYKGKKRHEMPPHIYAITDTAYRSMMQDREDQSILCTGESGAGKTENTKKVIQYLAYVASSHKSKKDQGELERQLLQANPILEAFGNAKTVKNDNSSRFGKFIRINFDVNGYIVGANIETYLLEKSRAIRQAKEERTFHIFYYLLSGAGEHLKTDLLLEPYNKYRFLSNGHVTIPGQQDKDMFQETMEAMRIMGIPEEEQMGLLRVISGVLQLGNIVFKKERNTDQASMPDNTAAQKVSHLLGINVTDFTRGILTPRIKVGRDYVQKAQTKEQADFAIEALAKATYERMFRWLVLRINKALDKTKRQGASFIGILDIAGFEIFDLNSFEQLCINYTNEKLQQLFNHTMFILEQEEYQREGIEWNFIDFGLDLQPCIDLIEKPAGPPGILALLDEECWFPKATDKSFVEKVMQEQGTHPKFQKPKQLKDKADFCIIHYAGKVDYKADEWLMKNMDPLNDNIATLLHQSSDKFVSELWKDVDRIIGLDQVAGMSETALPGAFKTRKGMFRTVGQLYKEQLAKLMATLRNTNPNFVRCIIPNHEKKAGKLDPHLVLDQLRCNGVLEGIRICRQGFPNRVVFQEFRQRYEILTPNSIPKGFMDGKQACVLMIKALELDSNLYRIGQSKVFFRAGVLAHLEEERDLKITDVIIGFQACCRGYLARKAFAKRQQQLTAMKVLQRNCAAYLKLRNWQWWRLFTKVKPLLQVSRQEEEMMAKEEELVKVREKQLAAENRLTEMETLQSQLMAEKLQLQEQLQAETELCAEAEELRARLTAKKQELEEICHDLEARVEEEEERCQHLQAEKKKMQQNIQELEEQLEEEESARQKLQLEKVTTEAKLKKLEEEQIILEDQNCKLAKEKKLLEDRIAEFTTNLTEEEEKSKSLAKLKNKHEAMITDLEERLRREEKQRQELEKTRRKLEGDSTDLSDQIAELQAQIAELKMQLAKKEEELQAALARVEEEAAQKNMALKKIRELESQISELQEDLESERASRNKAEKQKRDLGEELEALKTELEDTLDSTAAQQELRSKREQEVNILKKTLEEEAKTHEAQIQEMRQKHSQAVEELAEQLEQTKRVKANLEKAKQTLENERGELANEVKVLLQGKGDSEHKRKKVEAQLQELQVKFNEGERVRTELADKVTKLQVELDNVTGLLSQSDSKSSKLTKDFSALESQLQDTQELLQEENRQKLSLSTKLKQVEDEKNSFREQLEEEEEAKHNLEKQIATLHAQVADMKKKMEDSVGCLETAEEVKRKLQKDLEGLSQRHEEKVAAYDKLEKTKTRLQQELDDLLVDLDHQRQSACNLEKKQKKFDQLLAEEKTISAKYAEERDRAEAEAREKETKALSLARALEEAMEQKAELERLNKQFRTEMEDLMSSKDDVGKSVHELEKSKRALEQQVEEMKTQLEELEDELQATEDAKLRLEVNLQAMKAQFERDLQGRDEQSEEKKKQLVRQVREMEAELEDERKQRSMAVAARKKLEMDLKDLEAHIDSANKNRDEAIKQLRKLQAQMKDCMRELDDTRASREEILAQAKENEKKLKSMEAEMIQLQEELAAAERAKRQAQQERDELADEIANSSGKGALALEEKRRLEARIAQLEEELEEEQGNTELINDRLKKANLQIDQINTDLNLERSHAQKNENARQQLERQNKELKVKLQEMEGTVKSKYKASITALEAKIAQLEEQLDNETKERQAACKQVRRTEKKLKDVLLQVDDERRNAEQYKDQADKASTRLKQLKRQLEEAEEEAQRANASRRKLQRELEDATETADAMNREVSSLKNKLRRGDLPFVVPRRMARKGAGDGSDEEVDGKADGAEAKPAE

SEQ ID NO: 1504 - protein, 2548 aa, homo sapiens
MNINDGGRRRFEDNEHTLRIYPGAISEGTIYCPIPARKNSTAAEVIESLINKLHLDKTKCYVLAEVKEFGGEEWILNPTDCPVQRMMLWPRMALENRLSGEDYRFLLREKNLDGSIHYGSLQSWLRVTEERRRMMERGFLPQPQQKDFDDLCSLPDLNEKTLLENLRNRFKHEKIYTYVGSILIVINPFKFLPIYNPKYVKMYDNHQLGKLEPHIYAVADVAYHAMLQRKKNQCIVISGESGSGKTQSTNFLIHHLTALSQKGFASGVEQIILGAGPVLEAFGNAKTAHNNNSSRFGKFIQVNYQETGTVLGAYVEKYLLEKSRLVYQEHNERNYHVFYYLLAGASEDERSAFHLKQPEEYHYLNQITKKPLRQSWDDYCYDSEPDCFTVEGEDLRHDFERLQLAMEMVGFLPKTRRQIFSLLSAILHLGNICYKKKTYRDDSIDICNPEVLPIVSELLEVKEEMLFEALVTRKTVTVGEKLILPYKLAEAVTVRNSMAKSLYSALFDWIVFRINHALLNSKDLEHNTKTLSIGVLDIFGFEDYENNSFEQFCINFANERLQHYFNQHIFKLEQEEYRTEGISWHNIDYIDNTCCINLISKKPTGLLHLLDEESNFPQATNQTLLDKFKHQHEDNSYIEFPAVMEPAFIIKHYAGKVKYGVKDFREKNTDHMRPDIVALLRSSKNAFISGMIGIDPVAVFRWAILRAFFRAMVAFREAGKRNIHRKTGHDDTAPCAILKSMDSFSFLQHPVHQRSLEILQRCKEEKYSITRKNPRTPLSDLQGMNALNEKNQHDTFDIAWNGRTGIRQSRLSSGTSLLDKDGIFANSTSSKLLERAHGILTRNKNFKSKPALPKHLLEVNSLKHLTRLTLQDRITKSLLHLHKKKKPPSISAQFQASLSKLMETLGQAEPYFVKCIRSNAEKLPLRFSDVLVLRQLRYTGMLETVRIRQSGYSSKYSFQDFVSHFHVLLPRNIIPSKFNIQDFFRKINLNPDNYQVGKTMVFLKEQERQHLQDLLHQEVLRRIILLQRWFRVLLCRQHFLHLRQASVIIQRFWRNYLNQKQVRDAAVQKDAFVMASAAALLQASWRAHLERQRYLELRAAAIVIQQKWRDYYRRRHMAAICIQARWKAYRESKRYQEQRKKIILLQSTCRGFRARQRFKALKEQRLRETKPEVGLVNIKGYGSLEIQGSDPSGWEDCSFDNRIKAIEECKSVIESNRISRESSVDCLKESPNKQQERAQSQSGVDLQEDVLVRERPRSLEDLHQKKVGRAKRESRRMRELEQAIFSLELLKVRSLGGISPSEDRRWSTELVPEGLQSPRGTPDSESSQGSLELLSYEESQKSKLESVISDEGDLQFPSPKISSSPKFDSRDNALSASNETSSAEHLKDGTMKEMVVCSSESITCKPQLKDSFISNSLPTFFYIPQQDPLKTNSQLDTSIQRNKLLENEDTAGEALTLDINRETRRYHCSGKDQIVPSLNTESSNPVLKKLEKLNTEKEERQKQLQQQNEKEMMEQIRQQTDILEKERKAFKTIEKPRIGECLVAPSSYQSKQRVERPSSLLSLNTSNKGELNVLGSLSLKDAALAQKDSSSAHLPPKDRPVTVFFERKGSPCQSSTVKELSKTDRMGTQLNVACKLSNNRISKREHFRPTQSYSHNSDDLSREGNARPIFFTPKDNMSIPLVSKEALNSKNPQLHKEDEPAWKPVKLAGPGQRETSQRFSSVDEQAKLHKTMSQGEITKLAVRQKASDSDIRPQRAKMRFWAKGKQGEKKTTRVKPTTQSEVSPLFAGTDVIPAHQFPDELAAYHPTPPLSPELPGSCRKEFKENKEPSPKAKRKRSVKISNVALDSMHWQNDSVQIIASVSDLKSMDEFLLKKVNDLDNEDSKKDTLVDVVFKKALKEFRQNIFSFYSSALAMDDGKSIRYKDLYALFEQILEKTMRLEQRDSLGESPVRVWVNTFKVFLDEYMNEFKTSDCTATKVPKTERKKRRKKETDLVEEHNGHIFKATQYSIPTYCEYCSSLIWIMDRASVCKLCKYACHKKCCLKTTAKCSKKYDPELSSRQFGVELSRLTSEDRTVPLVVEKLINYIEMHGLYTEGIYRKSGSTNKIKELRQGLDTDAESVNLDDYNIHVIASVFKQWLRDLPNPLMTFELYEEFLRAMGLQERKETIRGVYSVIDQLSRTHLNTLERLIFHLVRIALQEDTNRMSANALAIVFAPCILRCPDTTDPLQSVQDISKTTTCVELIVVEQMNKYKARLKDISSLEFAENKAKTRLSLIRRSMGKGRIRRGNYPGPSSPVVVRLPSVSDVSEETLTSEAAMETDITEQQQAAMQQEERVLTEQIENLQKEKEELTFEMLVLEPRASDDETLESEASIGTADSSENLNMESEYAISEKSERSLALSSLKTAGKSEPSSKLRKQLKKQQDSLDVVDSSVSSLCLSNTASSHGTRKLFQIYSKSPFYRAASGNEALGMEGPLGQTKFLEDKPQFISRGTFNPEKGKQKLKNVKNSPQKTKETPEGTVMSGRRKTVDPDCTSNQQLALFGNNEFMV

SEQ ID NO: 1505 - protein, 790 aa, homo sapiens
MSRRRHSDENDGGQPHKRRKTSDANETEDHLESLICKVGEKSACSLESNLEGLAGVLEADLPNYKSKILRLLCTVARLLPEKLTIYTTLVGLLNARNYNFGGEFVEAMIRQLKESLKANNYNEAVYLVRFLSDLVNCHVIAAPSMVAMFENFVSVTQEEDVPQVRRDWYVYAFLSSLPWVGKELYEKKDAEMDRIFANTESYLKRRQKTHVPMLQVWTADKPHPQEEYLDCLWAQIQKLKKDRWQERHILRPYLAFDSILCEALQHNLPPFTPPPHTEDSVYPMPRVIFRMFDYTDDPEGPVMPGSHSVERFVIEENLHCIIKSHWKERKTCAAQLVSYPGKNKIPLNYHIVEVIFAELFQLPAPPHIDVMYTTLLIELCKLQPGSLPQVLAQATEMLYMRLDTMNTTCVDRFINWFSHHLSNFQFRWSWEDWSDCLSQDPESPKPKFVREVLEKCMRLSYHQRILDIVPPTFSALCPANPTCIYKYGDESSNSLPGHSVALCLAVAFKSKATNDEIFSILKDVPNPNQDDDDDEGFSFNPLKIEVFVQTLLHLAAKSFSHSFSALAKFHEVFKTLAESDEGKLHVLRVMFEVWRNHPQMIAVLVDKMIRTQIVDCAAVANWIFSSELSRDFTRLFVWEILHSTIRKMNKHVLKIQKELEEAKEKLARQHKRRSDDDDRSSDRKDGVLEEQIERLQEKVESAQSEQKNLFLVIFQRFIMILTEHLVRCETDGTSVLTPWYKNCIERLQQIFLQHHQIIQQYMVTLENLLFTAELDPHILAVFQQFCALQA

SEQ ID NO: 1506 - protein, 1258 aa, homo sapiens
MEKYVRLQKIGEGSFGKAILVKSTEDGRQYVIKEINISRMSSKEREESRREVAVLANMKHPNIVQYRESFEENGSLYIVMDYCEGGDLFKRINAQKGVLFQEDQILDWFVQICLALKHVHDRKILHRDIKSQNIFLTKDGTVQLGDFGIARVLNSTVELARTCIGTPYYLSPEICENKPYNNKSDIWALGCVLYELCTLKHAFEAGSMKNLVLKIISGSFPPVSLHYSYDLRSLVSQLFKRNPRDRPSVNSILEKGFIAKRIEKFLSPQLIAEEFCLKTFSKFGSQPIPAKRPASGQNSISVMPAQKITKPAAKYGIPLAYKKYGDKKLHEKKPLQKHKQAHQTPEKRVNTGEERRKISEEAARKRRLEFIEKEKKQKDQIISLMKAEQMKRQEKERLERINRAREQGWRNVLSAGGSGEVKAPFLGSGGTIAPSSFSSRGQYEHYHAIFDQMQQQRAEDNEAKWKREIYGRGLPERGILPGVRPGFPYGAAGHHHFPDADDIRKTLKRLKAVSKQANANRQKGQLAVERAKQVEEFLQRKREAMQNKARAEGHMVYLARLRQIRLQNFNERQQIKAKLRGEKKEANHSEGQEGSEEADMRRKKIESLKAHANARAAVLKEQLERKRKEAYEREKKVWEEHLVAKGVKSSDVSPPLGQHETGGSPSKQQMRSVISVTSALKEVGVDSSLTDTRETSEEMQKTNNAISSKREILRRLNENLKAQEDEKGKQNLSDTFEINVHEDAKEHEKEKSVSSDRKKWEAGGQLVIPLDELTLDTSFSTTERHTVGEVIKLGPNGSPRRAWGKSPTDSVLKILGEAELQLQTELLENTTIRSEISPEGEKYKPLITGEKKVQCISHEINPSAIVDSPVETKSPEFSEASPQMSLKLEGNLEEPDDLETEILQEPSGTNKDESLPCTITDVWISEEKETKETQSADRITIQENEVSEDGVSSTVDQLSDIHIEPGTNDSQHSKCDVDKSVQPEPFFHKVVHSEHLNLVPQVQSVQCSPEESFAFRSHSHLPPKNKNKNSLLIGLSTGLFDANNPKMLRTCSLPDLSKLFRTLMDVPTVGDVRQDNLEIDEIEDENIKEGPSDSEDIVFEETDTDLQELQASMEQLLREQPGEEYSEEEESVLKNSDVEPTANGTDVADEDDNPSSESALNEEWHSDNSDGEIASECECDSVFNHLEELRLHLEQEMGFEKFFEVYEKIKAIHEDEDENIEICSKIVQNILGNEHQHLYAKILHLVMADGAYQEDNDE

SEQ ID NO: 1507 - protein, 1120 aa, homo sapiens
MAEAPPVSGTFKFNTDAAEFIPQEKKNSGLNCGTQRRLDSNRIGRRNYSSPPPCHLSRQVPYDEISAVHQHSYHPSGSKPKSQQTSFQSSPCNKSPKSHGLQNQPWQKLRNEKHHIRVKKAQSLAEQTSDTAGLESSTRSESGTDLREHSPSESEKEVVGADPRGAKPKKATQFVYSYGRGPKVKGKLKCEWSNRTTPKPEDAGPESTKPVGVFHPDSSEASSRKGVLDGYGARRNEQRRYPQKRPPWEVEGARPRPGRNPPKQEGHRHTNAGHRNNMGPIPKDDLNERPAKSTCDSENLAVINKSSRRVDQEKCTVRRQDPQVVSPFSRGKQNHVLKNVETHTGSLIEQLTTEKYECMVCCELVRVTAPVWSCQSCYHVFHLNCIKKWARSPASQADGQSGWRCPACQNVSAHVPNTYTCFCGKVKNPEWSRNEIPHSCGEVCRKKQPGQDCPHSCNLLCHPGPCPPCPAFMTKTCECGRTRHTVRCGQAVSVHCSNPCENILNCGQHQCAELCHGGQCQPCQIILNQVCYCGSTSRDVLCGTDVGKSDGFGDFSCLKICGKDLKCGNHTCSQVCHPQPCQQCPRLPQLVRCCPCGQTPLSQLLELGSSSRKTCMDPVPSCGKVCGKPLPCGSLDFIHTCEKLCHEGDCGPCSRTSVISCRCSFRTKELPCTSLKSEDATFMCDKRCNKKRLCGRHKCNEICCVDKEHKCPLICGRKLRCGLHRCEEPCHRGNCQTCWQASFDELTCHCGASVIYPPVPCGTRPPECTQTCARVHECDHPVYHSCHSEEKCPPCTFLTQKWCMGKHEFRSNIPCHLVDISCGLPCSATLPCGMHKCQRLCHKGECLVDEPCKQPCTTPRADCGHPCMAPCHTSSPCPVTACKAKVELQCECGRRKEMVICSEASSTYQRIAAISMASKITDMQLGGSVEISKLITKKEVHQARLECDEECSALERKKRLAEAFHISEDSDPFNIRSSGSKFSDSLKEDARKDLKFVSDVEKEMETLVEAVNKGKNSKKSHSFPPMNRDHRRIIHDLAQVYGLESVSYDSEPKRNVVVTAIRGKSVCPPTTLTGVLEREMQARPPPPIPHHRHQSDKNPGSSNLQKITKEPIIDYFDVQD

SEQ ID NO: 1508 - protein, 311 aa, homo sapiens
MAALGVLESDLPSAVTLLKNLQEQVMAVTAQVKSLTQKVQAGAYPTEKGLSFLEVKDQLLLMYLMDLTHLILDKASGGSLQGHDAVLRLVEIRTVLEKLRPLDQKLKYQIDKLIKTAVTGSLSENDPLRFKPHPSNMMSKLSSEDEEEDEAEDDQSEASGKKSVKGVSKKYVPPRLVPVHYDETEAEREKKRLERAKRRALSSSVIRELKEQYSDAPEEIRDARHPHVTRQSQEDQHRINYEESMMVRLSVSKREKGRRKRANVMSSQLHSLTHFSDISALTGGTVHLDEDQNPIKKRKKIPQKGRKKKGQ

SEQ ID NO: 1509 - protein, 180 aa, homo sapiens
MRPLTEEETRVMFEKIAKYIGENLQLLVDRPDGTYCFRLHNDRVYYVSEKIMKLAANISGDKLVSLGTCFGKFTKTHKFRLHVTALDYLAPYAKYKVWIKPGAEQSFLYGNHVLKSGLGRITENTSQYQGVVVYSMADIPLGFGVAAKSTQDCRKVDPMAIVVFHQADIGEYVRHEETLT

SEQ ID NO: 1510 - protein, 688 aa, homo sapiens
MQVSSLNEVKIYSLSCGKSLPEWLSDRKKRALQKKDVDVRRRIELIQDFEMPTVCTTIKVSKDGQYILATGTYKPRVRCYDTYQLSLKFERCLDSEVVTFEILSDDYSKIVFLHNDRYIEFHSQSGFYYKTRIPKFGRDFSYHYPSCDLYFVGASSEVYRLNLEQGRYLNPLQTDAAENNVCDINSVHGLFATGTIEGRVECWDPRTRNRVGLLDCALNSVTADSEINSLPTISALKFNGALTMAVGTTTGQVLLYDLRSDKPLLVKDHQYGLPIKSVHFQDSLDLILSADSRIVKMWNKNSGKIFTSLEPEHDLNDVCLYPNSGMLLTANETPKMGIYYIPVLGPAPRWCSFLDNLTEELEENPESTVYDDYKFVTKKDLENLGLTHLIGSPFLRAYMHGFFMDIRLYHKVKLMVNPFAYEEYRKDKIRQKIEETRAQRVQLKKLPKVNKELALKLIEEEEEKQKSTWKKKVKSLPNILTDDRFKVMFENPDFQVDEESEEFRLLNPLVSKISEKRKKKLRLLEQQELREKEEEEEPEGKPSDAESSESSDDEKAWVEEVRKQRRLLQQEEKVKRQERLKEDQQTVLKPQFYEIKAGEEFRSFKDSATKQKLMNKTLEDRLKIEAKNGTLSVSDTTVGSKQLTFTLKRSEQQKKQQEAEKLHRQERKRLRRSAGHLKSRHKRGRSFH

SEQ ID NO: 1511 - protein, 1167 aa, homo sapiens
MKVNRETKRLYVGGLSQDISEADLQNQFSRFGEVSDVEIITRKDDQGNPQKVFAYINISVAEADLKKCMSVLNKTKWKGGTLQIQLAKESFLHRLAQEREAAKAKKEESTTGNANLLEKTGGVDFHMKAVPGTEVPGHKNWVVSKFGRVLPVLHLKNQHKRKIIKYDPSKYCHNLKKIGEDFSNTIPISSLTWELEGGNDPMSKKRRGEFSDFHGPPKKIIKVQKDESSTGSLAMSTRPRRVIERPPLTQQQAAQKRTCDSITPSKSSPVPVSDTQKLKNLPFKTSGLETAKKRNSISDDDTDSEDELRMMIAKEENLQRTTQPSINESESDPFEVVRDDFKSGVHKLHSLIGLGIKNRVSCHDSDDDIMRNDREYDSGDTDEIIAMKKNVAKVKNSTEFSQMEKSTKKTSFKNRENCELSDHCIKLQKRKSNVESALSHGLKSLNRKSPSHSSSSEDADSASELADSEGGEEYNAMMKNCLRVNLTLADLEQLAGSDLKVPNEDTKSDGPETTTQCKFDRGSKSPKTPTGLRRGRQCIRPAEIVASLLEGEENTCGKQKPKENNLKPKFQAFKGVGCLYEKESMKKSLKDSVASNNKDQNSMKHEDPSIISMEDGSPYVNGSLGEVTPCQHAKKANGPNYIQPQKRQTTFESQDRKAVSPSSSEKRSKNPISRPLEGKKSLSLSAKTHNIGFDKDSCHSTTKTEASQEERSDSSGLTSLKKSPKVSSKDTREIKTDFSLSISNSSDVSAKDKHAEDNEKRLAALEARQKAKEVQKKLVHNALANLDGHPEDKPTHIIFGSDSECETEETSTQEQSHPGEEWVKESMGKTSGKLFDSSDDDESDSEDDSNRFKIKPQFEGRAGQKLMDLQSHFGTDDRFRMDSRFLETDSEEEQEEVNEKKTAEEEELAEEKKKALNVVQSVLQINLSNSTNRGSVAAKKFKDIIHYDPTKQDHATYERKRDDKPKESKAKRKKKREEAEKLPEVSKEMYYNIAMDLKEIFQTTKYTSEKEEGTPWNEDCGKEKPEEIQDPAALTSDAEQPSGFTFSFFDSDTKDIKEETYRVETVKPGKIVWQEDPRLQDSSSEEEDVTEETDHRNSSPGEASLLEKETTRFFFFSKNDERLQGSDLFWRGVGSNMSRNSWEARTTNLRMDCRKKHKDAKRKMKPK

SEQ ID NO: 1512 - protein, 2471 aa, homo sapiens
MPALRPALLWALLALWLCCAAPAHALQCRDGYEPCVNEGMCVTYHNGTGYCKCPEGFLGEYCQHRDPCEKNRCQNGGTCVAQAMLGKATCRCASGFTGEDCQYSTSHPCFVSRPCLNGGTCHMLSRDTYECTCQVGFTGKECQWTDACLSHPCANGSTCTTVANQFSCKCLTGFTGQKCETDVNECDIPGHCQHGGTCLNLPGSYQCQCPQGFTGQYCDSLYVPCAPSPCVNGGTCRQTGDFTFECNCLPGFEGSTCERNIDDCPNHRCQNGGVCVDGVNTYNCRCPPQWTGQFCTEDVDECLLQPNACQNGGTCANRNGGYGCVCVNGWSGDDCSENIDDCAFASCTPGSTCIDRVASFSCMCPEGKAGLLCHLDDACISNPCHKGALCDTNPLNGQYICTCPQGYKGADCTEDVDECAMANSNPCEHAGKCVNTDGAFHCECLKGYAGPRCEMDINECHSDPCQNDATCLDKIGGFTCLCMPGFKGVHCELEINECQSNPCVNNGQCVDKVNRFQCLCPPGFTGPVCQIDIDDCSSTPCLNGAKCIDHPNGYECQCATGFTGVLCEENIDNCDPDPCHHGQCQDGIDSYTCICNPGYMGAICSDQIDECYSSPCLNDGRCIDLVNGYQCNCQPGTSGVNCEINFDDCASNPCIHGICMDGINRYSCVCSPGFTGQRCNIDIDECASNPCRKGATCINGVNGFRCICPEGPHHPSCYSQVNECLSNPCIHGNCTGGLSGYKCLCDAGWVGINCEVDKNECLSNPCQNGGTCDNLVNGYRCTCKKGFKGYNCQVNIDECASNPCLNQGTCFDDISGYTCHCVLPYTGKNCQTVLAPCSPNPCENAAVCKESPNFESYTCLCAPGWQGQRCTIDIDECISKPCMNHGLCHNTQGSYMCECPPGFSGMDCEEDIDDCLANPCQNGGSCMDGVNTFSCLCLPGFTGDKCQTDMNECLSEPCKNGGTCSDYVNSYTCKCQAGFDGVHCENNINECTESSCFNGGTCVDGINSFSCLCPVGFTGSFCLHEINECSSHPCLNEGTCVDGLGTYRCSCPLGYTGKNCQTLVNLCSRSPCKNKGTCVQKKAESQCLCPSGWAGAYCDVPNVSCDIAASRRGVLVEHLCQHSGVCINAGNTHYCQCPLGYTGSYCEEQLDECASNPCQHGATCSDFIGGYRCECVPGYQGVNCEYEVDECQNQPCQNGGTCIDLVNHFKCSCPPGTRGLLCEENIDDCARGPHCLNGGQCMDRIGGYSCRCLPGFAGERCEGDINECLSNPCSSEGSLDCIQLTNDYLCVCRSAFTGRHCETFVDVCPQMPCLNGGTCAVASNMPDGFICRCPPGFSGARCQSSCGQVKCRKGEQCVHTASGPRCFCPSPRDCESGCASSPCQHGGSCHPQRQPPYYSCQCAPPFSGSRCELYTAPPSTPPATCLSQYCADKARDGVCDEACNSHACQWDGGDCSLTMENPWANCSSPLPCWDYINNQCDELCNTVECLFDNFECQGNSKTCKYDKYCADHFKDNHCDQGCNSEECGWDGLDCAADQPENLAEGTLVIVVLMPPEQLLQDARSFLRALGTLLHTNLRIKRDSQGELMVYPYYGEKSAAMKKQRMTRRSLPGEQEQEVAGSKVFLEIDNRQCVQDSDHCFKNTDAAAALLASHAIQGTLSYPLVSVVSESLTPERTQLLYLLAVAVVIILFIILLGVIMAKRKRKHGSLWLPEGFTLRRDASNHKRREPVGQDAVGLKNLSVQVSEANLIGTGTSEHWVDDEGPQPKKVKAEDEALLSEEDDPIDRRPWTQQHLEAADIRRTPSLALTPPQAEQEVDVLDVNVRGPDGCTPLMLASLRGGSSDLSDEDEDAEDSSANIITDLVYQGASLQAQTDRTGEMALHLAARYSRADAAKRLLDAGADANAQDNMGRCPLHAAVAADAQGVFQILIRNRVTDLDARMNDGTTPLILAARLAVEGMVAELINCQADVNAVDDHGKSALHWAAAVNNVEATLLLLKNGANRDMQDNKEETPLFLAAREGSYEAAKILLDHFANRDITDHMDRLPRDVARDRMHHDIVRLLDEYNVTPSPPGTVLTSALSPVICGPNRSFLSLKHTPMGKKSRRPSAKSTMPTSLPNLAKEAKDAKGSRRKKSLSEKVQLSESSVTLSPVDSLESPHTYVSDTTSSPMITSPGILQASPNPMLATAAPPAPVHAQHALSFSNLHEMQPLAHGASTVLPSVSQLLSHHHIVSPGSGSAGSLSRLHPVPVPADWMNRMEVNETQYNEMFGMVLAPAEGTHPGIAPQSRPPEGKHITTPREPLPPIVTFQLIPKGSIAQPAGAPQPQSTCPPAVAGPLPTMYQIPEMARLPSVAFPTAMMPQQDGQVAQTILPAYHPFPASVGKYPTPPSQHSYASSNAAERTPSHSGHLQGEHPYLTPSPESPDQWSSSSPHSASDWSDVTTSPTPGGAGGGQRGPGTHMSEPPHNNMQVYA

SEQ ID NO: 1513 - protein, 603 aa, homo sapiens
MATIEEIAHQIIEQQMGEIVTEQQTGQKIQIVTALDHNTQGKQFILTNHDGSTPSKVILARQDSTPGKVFLTTPDAAGVNQLFFTTPDLSAQHLQLLTDNSPDQGPNKVFDLCVVCGDKASGRHYGAVTCEGCKGFFKRSIRKNLVYSCRGSKDCIINKHHRNRCQYCRLQRCIAFGMKQDSVQCERKPIEVSREKSSNCAASTEKIYIRKDLRSPLTATPTFVTDSESTRSTGLLDSGMFMNIHPSGVKTESAVLMTSDKAESCQGDLSTLANVVTSLANLGKTKDLSQNSNEMSMIESLSNDDTSLCEFQEMQTNGDVSRAFDTLAKALNPGESTACQSSVAGMEGSVHLITGDSSINYTEKEGPLLSDSHVAFRLTMPSPMPEYLNVHYIGESASRLLFLSMHWALSIPSFQALGQENSISLVKAYWNELFTLGLAQCWQVMNVATILATFVNCLHNSLQQDKMSTERRKLLMEHIFKLQEFCNSMVKLCIDGYEYAYLKAIVLFSPDHPSLENMEQIEKFQEKAYVEFQDYITKTYPDDTYRLSRLLLRLPALRLMNATITEELFFKGLIGNIRIDSVIPHILKMEPADYNSQIIGHSI

SEQ ID NO: 1514 - protein, 418 aa, homo sapiens
MFSPDQENHPSKAPVKYGELIVLGYNGSLPNGDRGRRKSRFALFKRPKANGVKPSTVHIACTPQAAKAISNKDQHSISYTLSRAQTVVVEYTHDSNTDMFQIGRSTESPIDFVVTDTVPGSQSNSDTQSVQSTISRFACRIICERNPPFTARIYAAGFDSSKNIFLGEKAAKWKTSDGQMDGLTTNGVLVMHPRNGFTEDSKPGIWREISVCGNVFSLRETRSAQQRGKMVEIETNQLQDGSLIDLCGATLLWRTAEGLSHTPTVKHLEALRQEINAARPQCPVGFNTLAFPSMKRKDVVDEKQPWVYLNCGHVHGYHNWGNKEERDGKDRECPMCRSVGPYVPLWLGCEAGFYVDAGPPTHAFSPCGHVCSEKTTAYWSQIPLPHGTHTFHAACPFCAHQLAGEQGYIRLIFQGPLD

SEQ ID NO: 1515 - protein, 1283 aa, homo sapiens
MWGSDRLAGAGGGGAAVTVAFTNARDCFLHLPRRLVAQLHLLQNQAIEVVWSHQPAFLSWVEGRHFSDQGENVAEINRQVGQKLGLSNGGQVFLKPCSHVVSCQQVEVEPLSADDWEILELHAVSLEQHLLDQIRIVFPKAIFPVWVDQQTYIFIQIVALIPAASYGRLETDTKLLIQPKTRRAKENTFSKADAEYKKLHSYGRDQKGMMKELQTKQLQSNTVGITESNENESEIPVDSSSVASLWTMIGSIFSFQSEKKQETSWGLTEINAFKNMQSKVVPLDNIFRVCKSQPPSIYNASATSVFHKHCAIHVFPWDQEYFDVEPSFTVTYGKLVKLLSPKQQQSKTKQNVLSPEKEKQMSEPLDQKKIRSDHNEEDEKACVLQVVWNGLEELNNAIKYTKNVEVLHLGKVWIPDDLRKRLNIEMHAVVRITPVEVTPKIPRSLKLQPRENLPKDISEEDIKTVFYSWLQQSTTTMLPLVISEEEFIKLETKDGLKEFSLSIVHSWEKEKDKNIFLLSPNLLQKTTIQVLLDPMVKEENSEEIDFILPFLKLSSLGGVNSLGVSSLEHITHSLLGRPLSRQLMSLVAGLRNGALLLTGGKGSGKSTLAKAICKEAFDKLDAHVERVDCKALRGKRLENIQKTLEVAFSEAVWMQPSVVLLDDLDLIAGLPAVPEHEHSPDAVQSQRLAHALNDMIKEFISMGSLVALIATSQSQQSLHPLLVSAQGVHIFQCVQHIQPPNQEQRCEILCNVIKNKLDCDINKFTDLDLQHVAKETGGFVARDFTVLVDRAIHSRLSRQSISTREKLVLTTLDFQKALRGFLPASLRSVNLHKPRDLGWDKIGGLHEVRQILMDTIQLPAKYPELFANLPIRQRTGILLYGPPGTGKTLLAGVIARESRMNFISVKGPELLSKYIGASEQAVRDIFIRAQAAKPCILFFDEFESIAPRRGHDNTGVTDRVVNQLLTQLDGVEGLQGVYVLAATSRPDLIDPALLRPGRLDKCVYCPPPDQVSRLEILNVLSDSLPLADDVDLQHVASVTDSFTGADLKALLYNAQLEALHGMLLSSGLQDGSSSSDSDLSLSSMVFLNHSSGSDDSAGDGECGLDQSLVSLEMSEILPDESKFNMYRLYFGSSYESELGNGTSSDLSSQCLSAPSSMTQDLPGVPGKDQLFSQPPVLRTASQEGCQELTQEQRDQLRADISIIKGRYRSQSGEDESMNQPGPIKTRLAISQSHLMTALGHTRPSISEDDWKNFAELYESFQNPKRRKNQSGTMFRPGQKVTLA

SEQ ID NO: 1516 - protein, 995 aa, homo sapiens
MAEAEFKDHSTAMDTEPNPGTSSVSTTTSSTTTTTITTSSSRMQQPQISVYSGSDRHAVQVIQQALHRPPSSAAQYLQQMYAAQQQHLMLHTAALQQQHLSSSQLQSLAAVQASLSSGRPSTSPTGSVTQQSSMSQTSINLSTSPTPAQLISRSQASSSTSGSITQQTMLLGSTSPTLTASQAQMYLRAQMLIFTPATTVAAVQSDIPVVSSSSSSSCQSAATQVQNLTLRSQKLGVLSSSQNGPPKSTSQTQSLTICHNKTTVTSSKISQRDPSPESNKKGESPSLESRSTAVTRTSSIHQLIAPASYSPIQPHSLIKHQQIPLHSPPSKVSHHQLILQQQQQQIQPITLQNSTQDPPPSQHCIPLQNHGLPPAPSNAQSQHCSPIQSHPSPLTVSPNQSQSAQQSVVVSPPPPHSPSQSPTIIIHPQALIQPHPLVSSALQPGPNLQQSTANQVQATAQLNLPSHLPLPASPVVHIGPVQQSALVSPGQQIVSPSHQQYSSLQSSPIPIASPPQMSTSPPAQIPPLPLQSMQSLQVQPEILSQGQVLVQNALVSEEELPAAEALVQLPFQTLPPPQTVAVNLQVQPPAPVDPPVVYQVEDVCEEEMPEESDECVRMDRTPPPPTLSPAAITVGRGEDLTSEHPLLEQVELPAVASVSASVIKSPSDPSHVSVPPPPLLLPAATTRSNSTSMHSSIPSIENKPPQAIVKPQILTHVIEGFVIQEGLEPFPVSRSSLLIEQPVKKRPLLDNQVINSVCVQPELQNNTKHADNSSDTEMEDMIAEETLEEMDSELLKCEFCGKMGYANEFLRSKRFCTMSCAKRYNVSCSKKFALSRWNRKPDNQSLGHRGRRPSGPDGAAREHILRQLPITYPSAEEDLASHEDSVPSAMTTRLRRQSERERERELRDVRIRKMPENSDLLPVAQTEPSIWTVDDVWAFIHSLPGCQDIADEFRAQEIDGQALLLLKEDHLMSAMNIKLGPALKICARINSLKES

SEQ ID NO: 1517 - protein, 1001 aa, homo sapiens
MPTEKKISSASDCINSMVEGSELKKVRSNSRIYHRYFLLDADMQSLRWEPSKKDSEKAKIDIKSIKEVRTGKNTDIFRSNGISDQISEDCAFSVIYGENYESLDLVANSADVANIWVTGLRYLISYGKHTLDMLESSQDNMRTSWVSQMFSEIDVDNLGHITLCNAVQCIRNLNPGLKTSKIELKFKELHKSKDKAGTEVTKEEFIEVFHELCTRPEIYFLLVQFSSNKEFLDTKDLMMFLEAEQGVAHINEEISLEIIHKYEPSKEGQEKGWLSIDGFTNYLMSPDCYIFDPEHKKVCQDMKQPLSHYFINSSHNTYLIEDQFRGPSDITGYIRALKMGCRSVELDVWDGPDNEPVIYTGHTMTSQIVFRSVIDIINKYAFFASEYPLILCLENHCSIKQQKVMVQHMKKLLGDKLYTTSPNVEESYLPSPDVLKGKILIKAKKLSSNCSGVEGDVTDEDEGAEMSQRMGKENMEQPNNVPVKRFQLCKELSELVSICKSVQFKEFQVSFQVQKYWEVCSFNEVLASKYANENPGDFVNYNKRFLARVFPSPMRIDSSNMNPQDFWKCGCQIVAMNFQTPGLMMDLNIGWFRQNGNCGYVLRPAIMREEVSFFSANTKDSVPGVSPQLLHIKIISGQNFPKPKGSGAKGDVVDPYVYVEIHGIPADCAEQRTKTVHQNGDAPIFDESFEFQINLPELAMVRFVVLDDDYIGDEFIGQYTIPFECLQTGYRHVPLQSLTGEVLAHASLFVHVAITNRRGGGKPHKRGLSVRKGKKSREYASLRTLWIKTVDEVFKNAQPPIRDATDLRENMQNAVVSFKELCGLSSVANLMQCMLAVSPRFLGPDNTPLVVLNLSEQYPTMELQGIVPEVLKKIVTTYDMMIQSLKALIENADAVYEKIVHCQKAAMEFHEHLHSIGTKEGLKERKLQKAVESFTWNITILKGQADLLKYAKNETLENLKQIHFAAVSCGLNKPGTENADVQKPRRSLEVIPEKANDETGE

SEQ ID NO: 1518 - protein, 1970 aa, homo sapiens
MHGGGPPSGDSACPLRTIKRVQFGVLSPDELKRMSVTEGGIKYPETTEGGRPKLGGLMDPRQGVIERTGRCQTCAGNMTECPGHFGHIELAKPVFHVGFLVKTMKVLRCVCFFCSKLLVDSNNPKIKDILAKSKGQPKKRLTHVYDLCKGKNICEGGEEMDNKFGVEQPEGDEDLTKEKGHGGCGRYQPRIRRSGLELYAEWKHVNEDSQEKKILLSPERVHEIFKRISDEECFVLGMEPRYARPEWMIVTVLPVPPLSVRPAVVMQGSARNQDDLTHKLADIVKINNQLRRNEQNGAAAHVIAEDVKLLQFHVATMVDNELPGLPRAMQKSGRPLKSLKQRLKGKEGRVRGNLMGKRVDFSARTVITPDPNLSIDQVGVPRSIAANMTFAEIVTPFNIDRLQELVRRGNSQYPGAKYIIRDNGDRIDLRFHPKPSDLHLQTGYKVERHMCDGDIVIFNRQPTLHKMSMMGHRVRILPWSTFRLNLSVTTPYNADFDGDEMNLHLPQSLETRAEIQELAMVPRMIVTPQSNRPVMGIVQDTLTAVRKFTKRDVFLERGEVMNLLMFLSTWDGKVPQPAILKPRPLWTGKQIFSLIIPGHINCIRTHSTHPDDEDSGPYKHISPGDTKVVVENGELIMGILCKKSLGTSAGSLVHISYLEMGHDITRLFYSNIQTVINNWLLIEGHTIGIGDSIADSKTYQDIQNTIKKAKQDVIEVIEKAHNNELEPTPGNTLRQTFENQVNRILNDARDKTGSSAQKSLSEYNNFKSMVVSGAKGSKINISQVIAVVGQQNVEGKRIPFGFKHRTLPHFIKDDYGPESRGFVENSYLAGLTPTEFFFHAMGGREGLIDTAVKTAETGYIQRRLIKSMESVMVKYDATVRNSINQVVQLRYGEDGLAGESVEFQNLATLKPSNKAFEKKFRFDYTNERALRRTLQEDLVKDVLSNAHIQNELEREFERMREDREVLRVIFPTGDSKVVLPCNLLRMIWNAQKIFHINPRLPSDLHPIKVVEGVKELSKKLVIVNGDDPLSRQAQENATLLFNIHLRSTLCSRRMAEEFRLSGEAFDWLLGEIESKFNQAIAHPGEMVGALAAQSLGEPATQMTLNTFHYAGVSAKNVTLGVPRLKELINISKKPKTPSLTVFLLGQSARDAERAKDILCRLEHTTLRKVTANTAIYYDPNPQSTVVAEDQEWVNVYYEMPDFDVARISPWLLRVELDRKHMTDRKLTMEQIAEKINAGFGDDLNCIFNDDNAEKLVLRIRIMNSDENKMQEEEEVVDKMDDDVFLRCIESNMLTDMTLQGIEQISKVYMHLPQTDNKKKIIITEDGEFKALQEWILETDGVSLMRVLSEKDVDPVRTTSNDIVEIFTVLGIEAVRKALERELYHVISFDGSYVNYRHLALLCDTMTCRGHLMAITRHGVNRQDTGPLMKCSFEETVDVLMEAAAHGESDPMKGVSENIMLGQLAPAGTGCFDLLLDAEKCKYGMEIPTNIPGLGAAGPTGMFFGSAPSPMGGISPAMTPWNQGATPAYGAWSPSVGSGMTPGAAGFSPSAASDASGFSPGYSPAWSPTPGSPGSPGPSSPYIPSPGGAMSPSYSPTSPAYEPRSPGGYTPQSPSYSPTSPSYSPTSPSYSPTSPNYSPTSPSYSPTSPSYSPTSPSYSPTSPSYSPTSPSYSPTSPSYSPTSPSYSPTSPSYSPTSPSYSPTSPSYSPTSPSYSPTSPSYSPTSPSYSPTSPSYSPTSPSYSPTSPNYSPTSPNYTPTSPSYSPTSPSYSPTSPNYTPTSPNYSPTSPSYSPTSPSYSPTSPSYSPSSPRYTPQSPTYTPSSPSYSPSSPSYSPTSPKYTPTSPSYSPSSPEYTPTSPKYSPTSPKYSPTSPKYSPTSPTYSPTTPKYSPTSPTYSPTSPVYTPTSPKYSPTSPTYSPTSPKYSPTSPTYSPTSPKGSTYSPTSPGYSPTSPTYSLTSPAISPDDSDEEN

SEQ ID NO: 1519 - protein, 272 aa, homo sapiens
MGNTTSDRVSGERHGAKAARSEGAGGHAPGKEHKIMVGSTDDPSVFSLPDSKLPGDKEFVSWQQDLEDSVKPTQQARPTVIRWSEGGKEVFISGSFNNWSTKIPLIKSHNDFVAILDLPEGEHQYKFFVDGQWVHDPSEPVVTSQLGTINNLIHVKKSDFEVFDALKLDSMESSETSCRDLSSSPPGPYGQEMYAFRSEERFKSPPILPPHLLQVILNKDTNISCDPALLPEPNHVMLNHLYALSIKDSVMVLSATHRYKKKYVTTLLYKPI

SEQ ID NO: 1520 - protein, 669 aa, homo sapiens
MQNSHMDEYRNSSNGSTGNSSEVVVEHPTDFSTEIMNVTEMEQSPDDSPNVNASTEETEMASAVDLPVTLTETEANFPPEYEKFWKTVENNPQDFTGWVYLLQYVEQENHLMAARKAFDRFFIHYPYCYGYWKKYADLEKRHDNIKPSDEVYRRGLQAIPLSVDLWIHYINFLKETLDPGDPETNNTIRGTFEHAVLAAGTDFRSDRLWEMYINWENEQGNLREVTAIYDRILGIPTQLYSHHFQRFKEHVQNNLPRDLLTGEQFIQLRRELASVNGHSGDDGPPGDDLPSGIEDITDPAKLITEIENMRHRIIEIHQEMFNYNEHEVSKRWTFEEGIKRPYFHVKPLEKAQLKNWKEYLEFEIENGTHERVVVLFERCVISCALYEEFWIKYAKYMENHSIEGVRHVFSRACTIHLPKKPMVHMLWAAFEEQQGNINEARNILKTFEECVLGLAMVRLRRVSLERRHGNLEEAEHLLQDAIKNAKSNNESSFYAVKLARHLFKIQKNLPKSRKVLLEAIERDKENTKLYLNLLEMEYSGDLKQNEENILNCFDKAVHGSLPIKMRITFSQRKVEFLEDFGSDVNKLLNAYDEHQTLLKEQDSLKRKAENGSEEPEEKKAHTEDTTSSSTQMIDGDLQANQAVYNYSAWYQYNYQNPWNYGQYYPPPPT

SEQ ID NO: 1521 - protein, 453 aa, homo sapiens; identical to SEQ ID NO: 872

SEQ ID NO: 1522 - protein, 504 aa, homo sapiens
MAAQALALLREVARLEAPLEELRALHSVLQAVPLNELRQQAAELRLGPLFSLLNENHREKTTLCVSILERLLQAMEPVHVARNLRVDLQRGLIHPDDSVKILTLSQIGRIVENSDAVTEILNNAELLKQIVYCIGGENLSVAKAAIKSLSRISLTQAGLEALFESNLLDDLKSVMKTNDIVRYRVYELIIEISSVSPESLNYCTTSGLVTQLLRELTGEDVLVRATCIEMVTSLAYTHHGRQYLAQEGVIDQISNIIVGADSDPFSSFYLPGFVKFFGNLAVMDSPQQICERYPIFVEKVFEMIESQDPTMIGVAVDTVGILGSNVEGKQVLQKTGTRFERLLMRIGHQSKNAPVELKIRCLDAISSLLYLPPEQQTDDLLRMTESWFSSLSRDPLELFRGISSQPFPELHCAALKVFTAIANQPWAQKLMFNSPGFVEYVVDRSVEHDKASKDAKYELVKALANSKTIAEIFGNPNYLRLRTYLSEGPYYVKPVSTTAVEGAE

SEQ ID NO: 1523 - protein, 599 aa, homo sapiens
MSRSLLLWFLLFLLLLPPLPVLLADPGAPTPVNPCCYYPCQHQGICVRFGLDRYQCDCTRTGYSGPNCTIPGLWTWLRNSLRPSPSFTHFLLTHGRWFWEFVNATFIREMLMRLVLTVRSNLIPSPPTYNSAHDYISWESFSNVSYYTRILPSVPKDCPTPMGTKGKKQLPDAQLLARRFLLRRKFIPDPQGTNLMFAFFAQHFTHQFFKTSGKMGPGFTKALGHGVDLGHIYGDNLERQYQLRLFKDGKLKYQVLDGEMYPPSVEEAPVLMHYPRGIPPQSQMAVGQEVFGLLPGLMLYATLWLREHNRVCDLLKAEHPTWGDEQLFQTTRLILIGETIKIVIEEYVQQLSGYFLQLKFDPELLFGVQFQYRNRIAMEFNHLYHWHPLMPDSFKVGSQEYSYEQFLFNTSMLVDYGVEALVDAFSRQIAGRIGGGRNMDHHILHVAVDVIRESREMRLQPFNEYRKRFGMKPYTSFQELVGEKEMAAELEELYGDIDALEFYPGLLLEKCHPNSIFGESMIEIGAPFSLKGLLGNPICSPEYWKPSTFGGEVGFNIVKTATLKKLVCLNTKTCPYVSFRVPDASQDDGPAVERPSTEL

SEQ ID NO: 1524 - protein, 501 aa, homo sapiens
MNRSRQVTCVAWVRCGVAKETPDKVELSKEEVKRLIAEAKEKLQEEGGGSDEEETGSPSEDGMQSARTQARPREPLEDGDPEDDRTLDDDELAEYDLDKYDEEGDPDAETLGESLLGLTVYGSNDQDPYVTLKDTEQYEREDFLIKPSDNLIVCGRAEQDQCNLEVHVYNQEEDSFYVHHDILLSAYPLSVEWLNFDPSPDDSTGNYIAVGNMTPVIEVWDLDIVDSLEPVFTLGSKLSKKKKKKGKKSSSAEGHTDAVLDLSWNKLIRNVLASASADNTVILWDMSLGKPAASLAVHTDKVQTLQFHPFEAQTLISGSYDKSVALYDCRSPDESHRMWRFSGQIERVTWNHFSPCHFLASTDDGFVYNLDARSDKPIFTLNAHNDEISGLDLSSQIKGCLVTASADKYVKIWDILGDRPSLVHSRDMKMGVLFCSSCCPDLPFIYAFGGQKEGLRVWDISTVSSVNEAFGRRERLVLGSARNSSISGPFGSRSSDTPMES

SEQ ID NO: 1525 - protein, 512 aa, homo sapiens
MMLSEQAQKWFPTHVQVTVLQAKDLKPKGKSGTNDTYTIIQLGKEKYSTSVAEKTLEPVWKEEASFELPGLLIQGSPEKYILFLIVMHRSLVGLDKFLGQVAINLNDIFEDKQRRKTEWFRLESKQGKRIKNRGEIKVNIQFMRNNMTASMFDLSMKDKTRSPFAKLKDKMKGRKNDGTFSDTSSAIIPSTHMPDANSEFSSGEIQMKSKPKKPFLLGPQRLSSAHSMSDLSGSHMSSEKLKAGTIGQTHLLGHQLDSFGTVPESGSLKSPHRRTLSFDTSKMNQPDSIVDEGELCFGRQNDPFTNVTASLPQKFATLPRKKNPFEESSETWDSSMNLFSKPIEIRKENKREKREKVSLFERVTGKKDSRRSDKLNNGGSDSPCDLKSPNAFSENRQDYFDYESTNPFTAKFRASNIMPSSSFHMSPTSNEDLRKIPDSNPFDATAGYRSLTYEEVLQELVKHKELLRRKDTHIRELEDYIDNLLVRVMEETPSILRVPYEPSRKAGKFSNS

SEQ ID NO: 1526 - protein, 815 aa, homo sapiens
MEVRASLQKVSGSSDSVATMNSEEFVLVPQYADDNSTKHEEKPQLKIVSNGDEQLEKAMEEILRDSEKRPSSLLVDCQSSSEISDHSFGDIPASQTNKPSLQLILDPSNTEISTPRPSSPGGLPEEDSVLFNKLTYLGCMKVSSPRNEVEALRAMATMKSSSQYPFPVTLYVPNVPEGSVRIIDQSSNVEIASFPIYKVLFCARGHDGTTESNCFAFTESSHGSEEFQIHVFSCEIKEAVSRILYSFCTAFKRSSRQVSDVKDSVIPTPDSDVFTFSVSLEVKEDDGKGNFSPVPKDRDKFYFKLKQGIEKKVVITVQQLSNKELAIERCFGMLLSPGRNVKNSDMHLLDMESMGKSYDGRAYVITGMWNPNAPVFLALNEETPKDKQVYMTVAVDMVVTEVVEPVRFLLETVVRVYPANERFWYFSRKTFTETFFMRLKQSEGKGHTNAGDAIYEVVSLQRESDKEEPVTPTSGGGPMSPQDDEAEEESDNELSSGTGDVSKDCPEKILYSWGELLGKWHSNLGARPKGLSTLVKSGVPEALRAEVWQLLAGCHDNQAMLDRYRILITKDSAQESVITRDIHRTFPAHDYFKDTGGDGQESLYKICKAYSVYDEDIGYCQGQSFLAAVLLLHMPEEQAFCVLVKIMYDYGLRDLYRNNFEDLHCKFYQLERLMQEQLPDLHSHFSDLNLEAHMYASQWFLTLFTAKFPLCMVFHIIDLLLCEGLNIIFHVALALLKTSKEDLLQADFEGALKFFRVQLPKRYRAEENARRLMEQACNIKVPTKKLKKYEKEYQTMRESQLQQEDPMDRYKFVYL

SEQ ID NO: 1527 - protein, 1312 aa, homo sapiens
MSRIEKMSILGVRSFGIEDKDKQIITFFSPLTILVGPNGAGKTTIIECLKYICTGDFPPGTKGNTFVHDPKVAQETDVRAQIRLQFRDVNGELIAVQRSMVCTQKSKKTEFKTLEGVITRTKHGEKVSLSSKCAEIDREMISSLGVSKAVLNNVIFCHQEDSNWPLSEGKALKQKFDEIFSATRYIKALETLRQVRQTQGQKVKEYQMELKYLKQYKEKACEIRDQITSKEAQLTSSKEIVKSYENELDPLKNRLKEIEHNLSKIMKLDNEIKALDSRKKQMEKDNSELEEKMEKVFQGTDEQLNDLYHNHQRTVREKERKLVDCHRELEKLNKESRLLNQEKSELLVEQGRLQLQADRHQEHIRARDSLIQSLATQLELDGFERGPFSERQIKNFHKLVRERQEGEAKTANQLMNDFAEKETLKQKQIDEIRDKKTGLGRIIELKSEILSKKQNELKNVKYELQQLEGSSDRILELDQELIKAERELSKAEKNSNVETLKMEVISLQNEKADLDRTLRKLDQEMEQLNHHTTTRTQMEMLTKDKADKDEQIRKIKSRHSDELTSLLGYFPNKKQLEDWLHSKSKEINQTRDRLAKLNKELASSEQNKNHINNELKRKEEQLSSYEDKLFDVCGSQDFESDLDRLKEEIEKSSKQRAMLAGATAVYSQFITQLTDENQSCCPVCQRVFQTEAELQEVISDLQSKLRLAPDKLKSTESELKKKEKRRDEMLGLVPMRQSIIDLKEKEIPELRNKLQNVNRDIQRLKNDIEEQETLLGTIMPEEESAKVCLTDVTIMERFQMELKDVERKIAQQAAKLQGIDLDRTVQQVNQEKQEKQHKLDTVSSKIELNRKLIQDQQEQIQHLKSTTNELKSEKLQISTNLQRRQQLEEQTVELSTEVQSLYREIKDAKEQVSPLETTLEKFQQEKEELINKKNTSNKIAQDKLNDIKEKVKNIHGYMKDIENYIQDGKDDYKKQKETELNKVIAQLSECEKHKEKINEDMRLMRQDIDTQKIQERWLQDNLTLRKRNEELKEVEEERKQHLKEMGQMQVLQMKSEHQKLEENIDNIKRNHNLALGRQKGYEEEIIHFKKELREPQFRDAEEKYREMMIVMRTTELVNKDLDIYYKTLDQAIMKFHSMKMEEINKIIRDLWRSTYRGQDIEYIEIRSDADENVSASDKRRNYNYRVVMLKGDTALDMRGRCSAGQKVLASLIIRLALAETFCLNCGIIALDEPTTNLDRENIESLAHALVEIIKSRSQQRNFQLLVITHDEDFVELLGRSEYVEKFYRIKKNIDQCSEIVKCSVSSLGFNVH

SEQ ID NO: 1528 - protein, 980 aa, homo sapiens
MVSKMIIENFEALKSWLSKTLEPICDADPSALAKYVLALVKKDKSEKELKALCIDQLDVFLQKETQIFVEKLFDAVNTKSYLPPPEQPSSGSLKVEFFPHQEKDIKKEEITKEEEREKKFSRRLNHSPPQSSSRYRENRSRDERKKDDRSRKRDYDRNPPRRDSYRDRYNRRRGRSRSYSRSRSRSWSKERLRERDRDRSRTRSRSRTRSRERDLVKPKYDLDRTDPLENNYTPVSSVPSISSGHYPVPTLSSTITVIAPTHHGNNTTESWSEFHEDQVDHNSYVRPPMPKKRCRDYDEKGFCMRGDMCPFDHGSDPVVVEDVNLPGMLPFPAQPPVVEGPPPPGLPPPPPILTPPPVNLRPPVPPPGPLPPSLPPVTGPPPPLPPLQPSGMDAPPNSATSSVPTVVTTGIHHQPPPAPPSLFTADTYDTDGYNPEAPSITNTSRPMYRHRVHAQRPNLIGLTSGDMDLPPREKPPNKSSMRIVVDSESRKRTIGSGEPGVPTKKTWFDKPNFNRTNSPGFQKKVQFGNENTKLELRKVPPELNNISKLNEHFSRFGTLVNLQVAYNGDPEGALIQFATYEEAKKAISSTEAVLNNRFIKVYWHREGSTQQLQTTSPKPLVQQPILPVVKQSVKERLGPVPSSTIEPAEAQSASSDLPQVLSTSTGLTKTVYNPAALKAAQKTLLVSTSAVDNNEAQKKKQEALKLQQDVRKRKQEILEKHIETQKMLISKLEKNKTMKSEDKAEIMKTLEVLTKNITKLKDEVKAASPGRCLPKSIKTKTQMQKELLDTELDLYKKMQAGEEVTELRRKYTELQLEAAKRGILSSGRGRGIHSRGRGAVHGRGRGRGRGRGVPGHAVVDHRPRALEISAFTESDREDLLPHFAQYGEIEDCQIDDSSLHAVITFKTRAEAEAAAVHGARFKGQDLKLAWNKPVTNISAVETEEVEPDEEEFQEESLVDDSLLQDDDEEEEDNESRSWRR

SEQ ID NO: 1529 - protein, 551 aa, homo sapiens
MEEELPLFSGDSGKPVQATLSSLKMLDVGKWPIFSLCSEEELQLIRQACVFGSAGNEVLYTTVNDEIFVLGTNCCGCLGLGDVQSTIEPRRLDSLNGKKIACLSYGSGPHIVLATTEGEVFTWGHNAYSQLGNGTTNHGLVPCHISTNLSNKQVIEVACGSYHSLVLTSDGEVFAWGYNNSGQVGSGSTVNQPIPRRVTGCLQNKVVVTIACGQMCCMAVVDTGEVYVWGYNGNGQLGLGNSGNQPTPCRVAALQGIRVQRVACGYAHTLVLTDEGQVYAWGANSYGQLGTGNKSNQSYPTPVTVEKDRIIEIAACHSTHTSAAKTQGGHVYMWGQCRGQSVILPHLTHFSCTDDVFACFATPAVTWRLLSVEPDDHLTVAESLKREFDNPDTADLKFLVDGKYIYAHKVLLKIRCEHFRSSLEDNEDDIVEMSEFSYPVYRAFLEYLYTDSISLSPEEAVGLLDLATFYRENRLKKLCQQTIKQGICEENAIALLSAAVKYDAQDLEEFCFRFCINHLTVVTQTSGFAEMDHDLLKNFISKASRVGAFKN

SEQ ID NO: 1530 - protein, 583 aa, homo sapiens
MPKPINVRVTTMDAELEFAIQPNTTGKQLFDQVVKTVGLREVWFFGLQYVDSKGYSTWLKLNKKVTQQDVKKENPLQFKFRAKFFPEDVSEELIQEITQRLFFLQVKEAILNDEIYCPPETAVLLASYAVQAKYGDYNKEIHKPGYLANDRLLPQRVLEQHKLTKEQWEERIQNWHEEHRGMLREDSMMEYLKIAQDLEMYGVNYFEIKNKKGTELWLGVDALGLNIYEHDDKLTPKIGFPWSEIRNISFNDKKFVIKPIDKKAPDFVFYAPRLRINKRILALCMGNHELYMRRRKPDTIEVQQMKAQAREEKHQKQLERAQLENEKKKREIAEKEKERIEREKEELMERLKQIEEQTIKAQKELEEQTRKALELDQERKRAKEEAERLEKERRAAEEAKSAIAKQAADQMKNQEQLAAELAEFTAKIALLEEAKKKKEEEATEWQHKAFAAQEDLEKTKEELKTVMSAPPPPPPPPVIPPTENEHDEHDENNAEASAELSNEGVMNHRSEEERVTETQKNERVKKQLQALSSELAQARDETKKTQNDVLHAENVKAGRDKYKTLRQIRQGNTKQRIDEFEAM

SEQ ID NO: 1531 - protein, 795 aa, homo sapiens
MEGLTLSDAEQKYYSDLFSYCDIESTKKVVVNGRVLELFRAAQLPNDVVLQIMELCGATRLGYFGRSQFYIALKLVAVAQSGFPLRVESINTVKDLPLPRFVASKNEQESRHAASYSSDSENQGSYSGVIPPPPGRGQVKKGSVSHDTVQPRTSADAQEPASPVVSPQQSPPTSPHTWRKHSRHPSGGNSERPLAGPGPFWSPFGEAQSGSSAGDAVWSGHSPPPPQENWVSFADTPPTSTLLTMHPASVQDQTTVRTVASATTAIEIRRQSSSYDDPWKITDEQRQYYVNQFKTIQPDLNGFIPGSAAKEFFTKSKLPILELSHIWELSDFDKDGALTLDEFCAAFHLVVARKNGYDLPEKLPESLMPKLIDLEDSADVGDQPGEVGYSGSPAEAPPSKSPSMPSLNQTWPELNQSSEQWETFSERSSSSQTLTQFDSNIAPADPDTAIVHPVPIRMTPSKIHMQEMELKRTGSDHTNPTSPLLVKPSDLLEENKINSSVKFASGNTVDGYSSSDSFTSDPEQIGSNVTRQRSHSGTSPDNTAPPPPPPRPQPSHSRSSSLDMNRTFTVTTGQQQAGVVAHPPAVPPRPQPSQAPGPAVHRPVDADGLITHTSTSPQQIPEQPNFADFSQFEVFAASNVNDEQDDEAEKHPEVLPAEKASDPASSLRVAKTDSKTEEKTAASAPANVSKGTTPLAPPPKPVRRRLKSEDELRPEVDEHTQKTGVLAAVLASQPSIPRSVGKDKKAIQASIRRNKETNTVLARLNSELQQQLKDVLEERISLEVQLEQLRPFSHL

SEQ ID NO: 1532 - protein, 1147 aa, homo sapiens; identical to SEQ ID NO: 169

SEQ ID NO: 1533 - protein, 211 aa, homo sapiens
MQSAMFLAVQHDCRPMDKSAGSGHKSEEKREKMKRTLLKDWKTRLSYFLQNSSTPGKPKTGKKSKQQAFIKPSPEEAQLWSEAFDELLASKYGLAAFRAFLKSEFCEENIEFWLACEDFKKTKSPQKLSSKARKIYTDFIEKEAPKEINIDFQTKTLIAQNIQEATSGCFTTAQKRVYSLMENNSYPRFLESEFYQDLCKKPQITTEPHAT

SEQ ID NO: 1534 - protein, 552 aa, homo sapiens
MGKVNVAKLRYMSRDDFRVLTAVEMGMKNHEIVPGSLIASIASLKHGGCNKVLRELVKHKLIAWERTKTVQGYRLTNAGYDYLALKTLSSRQVVESVGNQMGVGKESDIYIVANEEGQQFALKLHRLGRTSFRNLKNKRDYHKHRHNVSWLYLSRLSAMKEFAYMKALYERKFPVPKPIDYNRHAVVMELINGYPLCQIHHVEDPASVYDEAMELIVKLANHGLIHGDFNEFNLILDESDHITMIDFPQMVSTSHPNAEWYFDRDVKCIKDFFMKRFSYESELFPTFKDIRREDTLDVEVSASGYTKEMQADDELLHPLGPDDKNIETKEGSEFSFSDGEVAEKAEVYGSENESERNCLEESEGCYCRSSGDPEQIKEDSLSEESADARSFEMTEFNQALEEIKGQVVENNSVTEFSEEKNRTENYNRQDGQRVQGGVPAGSDEYEDECPHLIALSSLNREFRPFRDEENVGAMNQYRTRTLSITSSGSAVSCSTIPPELVKQKVKRQLTKQQKSAVRRRLQKGEANIFTKQRRENMQNIKSSLEAASFWGE

SEQ ID NO: 1535 - protein, 449 aa, homo sapiens
MPATLLRAVARSHHILSKAHQCRRIGHLMLKPLKEFENTTCSTLTIRQSLDLFLPDKTASGLNKSQILEMNQKKSDTSMLSPLNAARCQDEKAHLPTMKSFGTHRRVTHKPNLLGSKWFIKILKRHFSSVSTETFVPKQDFPQVKRPLKASRTRQPSRTNLPVLSVNEDLMHCTAFATADEYHLGNLSQDLASHGYVEVTSLPRDAANILVMGVENSAKEGDPGTIFFFREGAAVFWNVKDKTMKHVMKVLEKHEIQPYEIALVHWENEELNYIKIEGQSKLHRGEIKLNSELDLDDAILEKFAFSNALCLSVKLAIWEASLDKFIESIQSIPEALKAGKKVKLSHEEVMQKIGELFALRHRINLSSDFLITPDFYWDRENLEGLYDKTCQFLSIGRRVKVMNEKLQHCMELTDLMRNHLNEKRALRLEWMIVILITIEVMFELGRVFF

SEQ ID NO: 1536 - protein, 258 aa, homo sapiens
MAKYQGEVQSLKLDDDSVIEGVSDQVLVAVVVSFALIATLVYALFRNVHQNIHPENQELVRVLREQLQTEQDAPAATRQQFYTDMYCPICLHQASFPVETNCGHLFCGACIIAYWRYGSWLGAISCPICRQTVTLLLTVFGEDDQSQDVLRLHQDINDYNRRFSGQPRSIMERIMDLPTLLRHAFREMFSVGGLFWMFRIRIILCLMGAFFYLISPLDFVPEALFGILGFLDDFFVIFLLLIYISIMYREVITQRLTR

SEQ ID NO: 1537 - protein, 476 aa, homo sapiens
MANSAKAEEYEKMSLEQAKASVNSETESSFNINENTTASGTGLSEKTSVCRQVDIARKRKEFEDDLVKESSSCGKDTPSKKRKLDPEIVPEEKDCGDAEGNSKKRKRETEDVPKDKSSTGDGTQNKRKIALEDVPEKQKNLEEGHSSTVAAHYNELQEVGLEKRSQSRIFYLRNFNNWMKSVLIGEFLEKVRQKKKRDITVLDLGCGKGGDLLKWKKGRINKLVCTDIADVSVKQCQQRYEDMKNRRDSEYIFSAEFITADSSKELLIDKFRDPQMCFDICSCQFVCHYSFESYEQADMMLRNACERLSPGGYFIGTTPNSFELIRRLEASETESFGNEIYTVKFQKKGDYPLFGCKYDFNLEGVVDVPEFLVYFPLLNEMAKKYNMKLVYKKTFLEFYEEKIKNNENKMLLKRMQALEPYPANESSKLVSEKVDDYEHAAKYMKNSQVRLPLGTLSKSEWEATSIYLVFAFEKQQ

SEQ ID NO: 1538 - protein, 399 aa, homo sapiens
MSLQYGAEETPLAGSYGAADSFPKDFGYGVEEEEEEAAAAGGGVGAGAGGGCGPGGADSSKPRILLMGLRRSGKSSIQKVVFHKMSPNETLFLESTNKIYKDDISNSSFVNFQIWDFPGQMDFFDPTFDYEMIFRGTGALIYVIDAQDDYMEALTRLHITVSKAYKVNPDMNFEVFIHKVDGLSDDHKIETQRDIHQRANDDLADAGLEKLHLSFYLTSIYDHSIFEAFSKVVQKLIPQLPTLENLLNIFISNSGIEKAFLFDVVSKIYIATDSSPVDMQSYELCCDMIDVVIDVSCIYGLKEDGSGSAYDKESMAIIKLNNTTVLYLKEVTKFLALVCILREESFERKGLIDYNFHCFRKAIHEVFEVGVTSHRSCGHQTSASSLKALTHNGTPRNAI

SEQ ID NO: 1539 - protein, 408 aa, homo sapiens
MMCSRVPSEQSSGTSLLPKDGAPFSWDSLDEDGLDDSLLELSEGEEDDGDVNYTEEEIDALLKEDDPSYEQSSGEDDGGHVEKGERGSQILLDTPREKNSSYSLGPVAETPDLFKLPQLSTSSGHGPAHTKPLNRRSVLEKNLIKVTVAPFNPTVCDALLDKDETDSSKDTEKLSSLGEEMREDGLSPNESKLCTESEGISPNNSAWNGPQLSSSNNNFQQTVSDKNMPDSENPTSVFSRISDHSETPNMELSCRNGGSHKSSCEMRSLVVSTSSNKQDVLNKDSGKMKGHERRLGKVIPVLQTKTRTNVPTFSQSNLEQQKQLYLRSVIAHIEDPEDTNQGISGELCALMDQVHHMQHSKWQHPSDLTTRNYARRQKHLQRYSLTQWVDRNMRSHHRFQRLPDFSYS

SEQ ID NO: 1540 - protein, 832 aa, homo sapiens
MFALGLPFLVLLVASVESHLGVLGPKNVSQKDAEFERTYVDEVNSELVNIYTFNHTVTRNRTEGVRVSVNVLNKQKGAPLLFVVRQKEAVVSFQVPLILRGMFQRKYLYQKVERTLCQPPTKNESEIQFFYVDVSTLSPVNTTYQLRVSRMDDFVLRTGEQFSFNTTAAQPQYFKYEFPEGVDSVIVKVTSNKAFPCSVISIQDVLCPVYDLDNNVAFIGMYQTMTKKAAITVQRKDFPSNSFYVVVVVKTEDQACGGSLPFYPFAEDEPVDQGHRQKTLSVLVSQAVTSEAYVSGMLFCLGIFLSFYLLTVLLACWENWRQKKKTLLVAIDRACPESGHPRVLADSFPGSSPYEGYNYGSFENVSGSTDGLVDSAGTGDLSYGYQGRSFEPVGTRPRVDSMSSVEEDDYDTLTDIDSDKNVIRTKQYLYVADLARKDKRVLRKKYQIYFWNIATIAVFYALPVVQLVITYQTVVNVTGNQDICYYNFLCAHPLGNLSAFNNILSNLGYILLGLLFLLIILQREINHNRALLRNDLCALECGIPKHFGLFYAMGTALMMEGLLSACYHVCPNYTNFQFDTSFMYMIAGLCMLKLYQKRHPDINASAYSAYACLAIVIFFSVLGVVFGKGNTAFWIVFSIIHIIATLLLSTQLYYMGRWKLDSGIFRRILHVLYTDCIRQCSGPLYVDRMVLLVMGNVINWSLAAYGLIMRPNDFASYLLAIGICNLLLYFAFYIIMKLRSGERIKLIPLLCIVCTSVVWGFALFFFFQGLSTWQKTPAESREHNRDCILLDFFDDHDIWHFLSSIAMFGSFLVLLTLDDDLDTVQRDKIYVF

SEQ ID NO: 1541 - protein, 325 aa, homo sapiens
MFANLKYVSLGILVFQTTSLVLTMRYSRTLKEEGPRYLSSTAVVVAELLKIMACILLVYKDSKCSLRALNRVLHDEILNKPMETLKLAIPSGIYTLQNNLLYVALSNLDAATYQVTYQLKILTTALFSVSMLSKKLGVYQWLSLVILMTGVAFVQWPSDSQLDSKELSAGSQFVGLMAVLTACFSSGFAGVYFEKILKETKQSVWIRNIQLGFFGSIFGLMGVYIYDGELVSKNGFFQGYNRLTWIVVVLQALGGLVIAAVIKYADNILKGFATSLSIILSTLISYFWLQDFVPTSVFFLGAILVITATFLYGYDPKPAGNPTKA

SEQ ID NO: 1542 - protein, 355 aa, homo sapiens
MAEVHRRQHARVKGEAPAKSSTLRDEEELGMASAETLTVFLKLLAAGFYGVSSFLIVVVNKSVLTNYRFPSSLCVGLGQMVATVAVLWVGKALRVVKFPDLDRNVPRKTFPLPLLYFGNQITGLFSTKKLNLPMFTVLRRFSILFTMFAEGVLLKKTFSWGIKMTVFAMIIGAFVAASSDLAFDLEGYAFILINDVLTAANGAYVKQKLDSKELGKYGLLYYNALFMILPTLAIAYFTGDAQKAVEFEGWADTLFLLQFTLSCVMGFILMYATVLCTQYNSALTTTIVGCIKNILITYIGMVFGGDYIFTWTNFIGLNISIAGSLVYSYITFTEEQLSKQSEANNKLDIKGKGAV

SEQ ID NO: 1543 - protein, 710 aa, homo sapiens; identical to SEQ ID NO: 927

SEQ ID NO: 1544 - protein, 1217 aa, homo sapiens
MYIKQVIIQGFRSYRDQTIVDPFSSKHNVIVGRNGSGKSNFFYAIQFVLSDEFSHLRPEQRLALLHEGTGPRVISAFVEIIFDNSDNRLPIDKEEVSLRRVIGAKKDQYFLDKKMVTKNDVMNLLESAGFSRSNPYYIVKQGKINQMATAPDSQRLKLLREVAGTRVYDERKEESISLMKETEGKREKINELLKYIEERLHTLEEEKEELAQYQKWDKMRRALEYTIYNQELNETRAKLDELSAKRETSGEKSRQLRDAQQDARDKMEDIERQVRELKTKISAMKEEKEQLSAERQEQIKQRTKLELKAKDLQDELAGNSEQRKRLLKERQKLLEKIEEKQKELAETEPKFNSVKEKEERGIARLAQATQERTDLYAKQGRGSQFTSKEERDKWIKKELKSLDQAINDKKRQIAAIHKDLEDTEANKEKNLEQYNKLDQDLNEVKARVEELDRKYYEVKNKKDELQSERNYLWREENAEQQALAAKREDLEKKQQLLRAATGKAILNGIDSINKVLDHFRRKGINQHVQNGYHGIVMNNFECEPAFYTCVEVTAGNRLFYHIVDSDEVSTKILMEFNKMNLPGEVTFLPLNKLDVRDTAYPETNDAIPMISKLRYNPRFDKAFKHVFGKTLICRSMEVSTQLARAFTMDCITLEGDQVSHRGALTGGYYDTRKSRLELQKDVRKAEEELGELEAKLNENLRRNIERINNEIDQLMNQMQQIETQQRKFKASRDSILSEMKMLKEKRQQSEKTFMPKQRSLQSLEASLHAMESTRESLKAELGTDLLSQLSLEDQKRVDALNDEIRQLQQENRQLLNERIKLEGIITRVETYLNENLRKRLDQVEQELNELRETEGGTVLTATTSELEAINKRVKDTMARSEDLDNSIDKTEAGIKELQKSMERWKNMEKEHMDAINHDTKELEKMTNRQGMLLKKKEECMKKIRELGSLPQEAFEKYQTLSLKQLFRKLEQCNTELKKYSHVNKKALDQFVNFSEQKEKLIKRQEELDRGYKSIMELMNVLELRKYEAIQLTFKQVSKNFSEVFQKLVPGGKATLVMKKGDVEGSQSQDEGEGSGESERGSGSQSSVPSVDQFTGVGIRVSFTGKQGEMREMQQLSGGQKSLVALALIFAIQKCDPAPFYLFDEIDQALDAQHRKAVSDMIMELAVHAQFITTTFRPELLESADKFYGVKFRNKVSHIDVITAEMAKDFVEDDTTHG

SEQ ID NO: 1545 - protein, 1091 aa, homo sapiens
MAKRKEENFSSPKNAKRPRQEELEDFDKDGDEDECKGTTLTAAEVGIIESIHLKNFMCHSMLGPFKFGSNVNFVVGNNGSGKSAVLTALIVGLGGRAVATNRGSSLKGFVKDGQNSADISITLRNRGDDAFKASVYGNSILIQQHISIDGSRSYKLKSATGSVVSTRKEELIAILDHFNIQVDNPVSVLTQEMSKQFLQSKNEGDKYKFFMKATQLEQMKEDYSYIMETKERTKEQIHQGEERLTELKRQCVEKEERFQSIAGLSTMKTNLESLKHEMAWAVVNEIEKQLNAIRDNIKIGEDRAARLDRKMEEQQVRLNEAEQKYKDIQDKLEKISEETNARAPECMALKADVVAKKRAYNEAEVLYNRSLNEYKALKKDDEQLCKRIEELKKSTDQSLEPERLERQKKISWLKERVKAFQNQENSVNQEIEQFQQAIEKDKEEHGKIKREELDVKHALSYNQRQLKELKDSKTDRLKRFGPNVPALLEAIDDAYRQGHFTYKPVGPLGACIHLRDPELALAIESCLKGLLQAYCCHNHADERVLQALMKRFYLPGTSRPPIIVSEFRNEIYDVRHRAAYHPDFPTVLTALEIDNAVVANSLIDMRGIETVLLIKNNSVARAVMQSQKPPKNCREAFTADGDQVFAGRYYSSENTRPKFLSRDVDSEISDLENEVENKTAQILNLQQHLSALEKDIKHNEELLKRCQLHYKELKMKIRKNISEIRELENIEEHQSVDIATLEDEAQENKSKMKMVEEHMEQQKENMEHLKSLKIEAENKYDAIKFKINQLSELADPLKDELNLADSEVDNQKRGKRHYEEKQKEHLDTLNKKKRELDMKEKELEEKMSQARQICPERIEVEKSASILDKEINRLRQKIQAEHASHGDREEIMRQYQEARETYLDLDSKVRTLKKFIKLLGEIMEHRFKTYQQFRRCLTLRCKLYFDNLLSQRAYCGKMNFDHKNETLSISVQPGEGNKAAFNDMRALSGGERSFSTVCFILSLWSIAESPFRCLDEFDVYMDMVNRRIAMDLILKMADSQRFRQFILLTPQSMSSLPSSKLIRILRMSDPERGQTTLPFRPVTQEEDDDQR

SEQ ID NO: 1546 - protein, 372 aa, homo sapiens
MSRRRFDCRSISGLLTTTPQIPIKMENFNNFYILTSKELGRGKFAVVRQCISKSTGQEYAAKFLKKRRRGQDCRAEILHEIAVLELAKSCPRVINLHEVYENTSEIILILEYAAGGEIFSLCLPELAEMVSENDVIRLIKQILEGVYYLHQNNIVHLDLKPQNILLSSIYPLGDIKIVDFGMSRKIGHACELREIMGTPEYLAPEILNYDPITTATDMWNIGIIAYMLLTHTSPFVGEDNQETYLNISQVNVDYSEETFSSVSQLATDFIQSLLVKNPEKRPTAEICLSHSWLQQWDFENLFHPEETSSSSQTQDHSVRSSEDKTSKSSCNGTCGDREDKENIPEDSSMVSKRFRFDDSLPNPHELVSDLLC

SEQ ID NO: 1547 - protein, 414 aa, homo sapiens
MNLQRYWGEIPISSSQTNRSSFDLLPREFRLVEVHDPPLHQPSANKPKPPTMLDIPSEPCSLTIHTIQLIQHNRRLRNLIATAQAQNQQQTEGVKTEESEPLPSCPGSPPLPDDLLPLDCKNPNAPFQIRHSDPESDFYRGKGEPVTELSWHSCRQLLYQAVATILAHAGFDCANESVLETLTDVAHEYCLKFTKLLRFAVDREARLGQTPFPDVMEQVFHEVGIGSVLSLQKFWQHRIKDYHSYMLQISKQLSEEYERIVNPEKATEDAKPVKIKEEPVSDITFPVSEELEADLASGDQSLPMGVLGAQSERFPSNLEVEASPQASSAEVNASPLWNLAHVKMEPQESEEGNVSGHGVLGSDVFEEPMSGMSEAGIPQSPDDSDSSYGSHSTDSLMGSSPVFNQRCKKRMRKI

SEQ ID NO: 1548 - protein, 6885 aa, homo sapiens
MASSPELPTEDEQGSWGIDDLHISLQAEQEDTQKKAFTCWINSQLARHTSPSVISDLFTDIKKGHVLLDLLEVLSGQQLPRDKGSNTFQCRINIEHALTFLRNRSIKLINIHVTDIIDGNPSIILGLIWTIILHFHIEKLAQTLSCNYNQPSLDDVSVVDSSPASSPPAKKCSKVQARWQMSARKALLLWAQEQCATYESVNVTDFKSSWRNGMAFLAIIHALRPDLIDMKSVKHRSNKDNLREAFRIAEQELKIPRLLEPEDVDVVDPDEKSIMTYVAQFLQYSKDAPGTGEEAQGKVKDAMGWLTLQKEKLQKLLKDSENDTYFKKYNSLLSFMESFNEEKKSFLDVLSIKRDLDELDKDHLQLREAWDGLDHQINAWKIKLNYALPPPLHQTEAWLQEVEELMDEDLSASQDHSQAVTLIQEKMTLFKSLMDRFEHHSNILLTFENKDENHLPLVPPNKLEEMKRRINNILEKKFILLLEFHYYKCLVLGLVDEVKSKLDIWNIKYGSRESVELLLEDWHKFIEEKEFLARLDTSFQKCGEIYKNLAGECQNINKQYMMVKSDVCMYRKNIYNVKSTLQKVLACWATYVENLRLLRACFEETKKEEIKEVPFETLAQWNLEHATLNEAGNFLVEVSNDVVGSSISKELRRLNKRWRKLVSKTQLEMNLPLMIKKQDQPTFDNSGNILSKEEKATVEFSTDMSVELPENYNQNIKAGEKHEKENEEFTGQLKVAKDVEKLIGQVEIWEAEAKSVLDQDDVDTSMEESLKHLIAKGSMFDELMARSEDMLQMDIQNISSQESFQHVLTTGLQAKIQEAKEKVQINVVKLIAALKNLTDVSPDLDIRLKMEESQKELESYMMRAQQLLGQRESPGELISKHKEALIISNTKSLAKYLKAVEELKNNVTEDIKMSLEEKSRDVCAKWESLHHELSLYVQQLKIDIEKGKLSDNILKLEKQINKEKKLIRRGRTKGLIKEHEACFSEEGCLYQLNHHMEVLRELCEELPSQKSQQEVKRLLKDYEQKIERLLKCASEIHMTLQPTAGGTSKNEGTITTSENRGGDPHSEAPFAKSDNQPSTEKAMEPTMKFSLASVLRPLQEESIMEKDYSASINSLLERYDTYRDILEHHLQNNKFRITSDFSSEEDRSSSCLQAKLTDLQVIKNETDARWKEFEIISLKLENHVNDIKKPFVIKERDTLKERERELQMTLNTRMESLETALRLVLPVEKASLLLCGSDLPLHKMAIQGFHLIDADRIYQHLRNIQDSIAKQIEICNRLEEPGNFVLKELHPFDLHAMQNIILKYKTQFEGMNHRVQRSEDTLKALEDFLASLRTAKLSAEPVTDLSASDTQVAQENTLTVKNKEGEIHLMKDKAKHLDKCLKMLDMSFKDAERGDDTSCENLLDAFSIKLSETHGYGVQEEFTEENKLLEACIFKNNELLKNIQDVQSQISKIGLKDPTVPAVKHRKKSLIRLDKVLDEYEEEKRHLQEMANSLPHFKDGREKTVNQQCQNTVVLWENTKALVTECLEQCGRVLELLKQYQNFKSILTTLIQKEESVISLQASYMGKENLKKRIAEIEIVKEEFNEHLEVVDKINQVCKNLQFYLNKMKTFEEPPFEKEANIIVDRWLDINEKTEDYYENLGRALALWDKLFNLKNVIDEWTEKALQKMELHQLTEEDRERLKEELQVHEQKTSEFSRRVAEIQFLLQSSEIPLELQVMESSILNKMEHVQKCLTGESNCHALSGSTAELREDLDQAKTQIGMTESLLKALSPSDSLEIFTKLEEIQQQILQQKHSMILLENQIGCLTPELSELKKQYESVSDLFNTKKSVLQDHFSKLLNDQCKNFNDWFSNIKVNLKECFESSETKKSVEQKLQKLSDFLTLEGRNSKIKQVDSVLKHVKKHLPKAHVKELISWLVGQEFELEKMESICQARAKELEDSLQQLLRLQDDHRNLRKWLTNQEEKWKGMEEPGEKTELFCQALARKREQFESVAQLNNSLKEYGFTEEEEIIMEATCLMDRYQTLLRQLSEIEEEDKLLPTEDQSFNDLAHDVIHWIKEIKESLMVLNSSEGKMPLEERIQKIKEIILLKPEGDARIETIMKQAESSEAPLVQKTLTDISNQWDNTLHLASTYLSHQEKLLLEGEKYLQSKEDLRLMLIELKKKQEAGFALQHGLQEKKAQLKIYKKFLKKAQDLTSLLKELKSQGNYLLECTKNPSFSEEPWLEIKHLHESLLQQLQDSVQNLDGHVREHDSYQVCVTDLNTTLDNFSKEFVSFSDKPVDQIAVEEKLQKLQELENRLSLQDGTLKKILALAKSVKQNTSSVGQKIIKDDIKSLQCKQKDLENRLASAKQEMECCLNSILKSKRSTEKKGKFTLPGREKQATSDVQESTQESAAVEKLEEDWEINKDSAVEMAMSKQLSLNAQESMKNTEDERKVNELQNQPLELDTMLRNEQLEEIEKLYTQLEAKKAAIKPLEQTECLNKTETGALVLHNIGYSAQHLDNLLQALITLKKNKESQYCVLRDFQEYLAAVESSMKALLTDKESLKVGPLDSVTYLDKIKKFIASIEKEKDSLGNLKIKWENLSNHVTDMDKKLLESQIKQLEHGWEQVEQQIQKKYSQQVVEYDEFTTLMNKVQDTEISLQQQQQHLQLRLKSPEERAGNQSMIALTTDLQATKHGFSVLKGQAELQMKRIWGEKEKKNLEDGINNLKKQWETLEPLHLEAENQIKKCDIRNKMKETILWAKNLLGELNPSIPLLPDDILSQIRKCKVTHDGILARQQSVESLAEEVKDKVPSLTTYEGSDLNNTLEDLRNQYQMLVLKSTQRSQQLEFKLEERSNFFAIIRKFQLMVQESETLIIPRVETAATEAELKHHHVTLEASQKELQEIDSGISTHLQELTNIYEELNVFERLFLEDQLKNLKIRTNRIQRFIQNTCNEVEHKIKFCRQFHEKTSALQEEADSIQRNELLLNQEVNKGVKEEIYNLKDRLTAIKCCILQVLKLKKVFDYIGLNWDFSQLDQLQTQVFEKEKELEEKIKQLDTFEEEHGKYQALLSKMRAIDLQIKKMTEVVLKAPDSSPESRRLNAQILSQRIEKAKCLCDEIIKKLNENKTFDDSFKEKEILQIKLNAEENDKLYKVLQNMVLELSPKELDEKNCQDKLETSLHVLNQIKSQLQQPLLINLEIKHIQNEKDNCEAFQEQVWAEMCSIKAVTAIEKQREENSSEASDVETKLREFEDLQMQLNTSIDLRTNVLNDAYENLTRYKEAVTRAVESITSLEAIIIPYRVDVGNPEESLEMPLRKQEELESTVAHIQDLTEKLGMISSPEAKLQLQYTLQELVSKNSAMKEAFKAQETEAERYLENYKCYRKMEEDIYTNLSKMETVLGQSMSSLPLSYREALERLEQSKALVSNLISTKEELMKLRQILRLLRLRCTENDGICLLKIVSALWEKWLSLLEAAKEWEMWCEELKQEWKFVSEEIEREAIILDNLQEELPEISKTKEAATTEELSELLDCLCQYGENVEKQQLLLTLLLQRIRSIQNVPESSGAVETVPAFQEITSMKERCNKLLQKVQKNKELVQTEIQERHSFTKEIIALKNFFQQTTTSFQNMAFQDHPEKSEQFEELQSILKKGKLTFENIMEKLRIKYSEMYTIVPAEIESQVEECRKALEDIDEKISNEVLKSSPSYAMRRKIEEINNGLHNVEKMLQQKSKNIEKAQEIQKKMWDELDLWHSKLNELDSEVQDIVEQDPGQAQEWMDNLMIPFQQYQQVSQRAECRTSQLNKATVKMEEYSDLLKSTEAWIENTSHLLANPADYDSLRTLSHHASTVQMALEDSEQKHNLLHSIFMDLEDLSIIFETDELTQSIQELSNQVTALQQKIMESLPQIQRMADDVVAIESEVKSMEKRVSKIKTILLSKEIFDFSPEEHLKHGEVILENIRPMKKTIAEIVSYQVELRLPQTGMKPLPVFQRTNQLLQDIKLLENVTQEQNELLKVVIKQTNEWDEEIENLKQILNNYSAQFSLEHMSPDQADKLPQLQGEIERMEKQILSLNQRKEDLLVDLKATVLNLHQHLKQEQEGVERDRLPAVTSEEGGVAERDASERKLNRRGSMSYLAAVEEEVEESSVKSDNGDEKAEPSPQSWSSLWKHDKDMEEDRASSSSGTIVQEAYGKISTSDNSMAQILTPDSLNTEQGPECSLRPNQTEEGTTPPIEADTLDSSDAQGGLEPRVEKTRPEPTEVLHACKTQVAELELWLQQANVAVEPETLNADMQQVLEQQLVGCQAMLTEIEHKVAFLLETCKDQGLGDNGATQHEAEALSLKLKTVKCNLEKVQMMLQEKHSEDQHPTILKKSSEPEHQEALQPVNLSELESIVTERPQFSRQKDFQQQQVLELKPMEQKDFIKFIEFNAKKMWPQYCQHDNDTTQESSASNQASSPENDVPDSILSPQGQNGDKWQYLHHELSSKIKLPLPQLVEPQVSTNMGILPSVTMYNFRYPTTEELKTYTTQLEDLRQEASNLQTQENMTEEAYINLDKKLFELFLTLSQCLSSVEEMLEMPRLYREDGSGQQVHYETLALELKKLYLALSDKKGDLLKAMTWPGENTNLLLECFDNLQVCLEHTQAAAVCRSKSLKAGLDYNRSYQNEIKRLYHQLIKSKTSLQQSLNEISGQSVAEQLQKADAYTVELENAESRVAKLRDEGERLHLPYALLQEVYKLEDVLDSMWGMLRARYTELSSPFVTESQQDALLQGMVELVKIGKEKLAHGHLKQTKSKVALQAQIENHKVFFQKLVADMLLIQAYSAKILPSLLQNRETFWAEQVTEVKILEEKSRQCGMKLQSLLQKWEEFDENYASLEKDLEILISTLPSVSLVEETEERLVERISFYQQIKRNIGGKHARLYQTLNEGKQLVASVSCPELEGQIAKLEEQWLSLNKKIDHELHRLQALLKHLLSYNRDSDQLTKWLESSQHTLNYWKEQSLNVSQDLDTIRSNINNFFEFSKEVDEKSSLKTAVISIGNQLLHLKETDTATLRASLAQFEQKWTMLITQLPDIQEKLHQLQMEKLPSRKAITEMISWMNNVEHQTSDEDSVHSPSSASQVKHLLQKHKEFRMEMDYKQWIVDFVNQSLLQLSTCDVESKRYERTEFAEHLGEMNRQWHRVHGMLNRKIQHLEQLLESITESENKIQILNNWLEAQEERLKTLQKPESVISVQKLLLDCQDIENQLAIKSKALDELKQSYLTLESGAVPLLEDTASRIDELFQKRSSVLTQVNQLKTSMQSVLQEWKIYDQLYDEVNMMTIRFWYCMEHSKPVVLSLETLRCQVENLQSLQDEAESSEGSWEKLQEVIGKLKGLCPSVAEIIEEKCQNTHKRWTQVNQAIADQLQKAQSLLQLWKAYSNAHGEAAARLKQQEAKFQQLANISMSGNNLAEILPPALQDIKELQHDVQKTKEAFLQNSSVLDRLPQPAESSTHMLLPGPLHSLQRAAYLEKMLLVKANEFEFVLSQFKDFGVRLESLKGLIMHEEENLDRLHQQEKENPDSFLNHVLALTAQSPDIEHLNEVSLKLPLSDVAVKTLQNMNRQWIRATATALERCSELQGIGLNEKFLYCCEKWIQLLEKIEEALKVDVANSLPELLEQQKTYKMLEAEVSINQTIADSYVTQSLQLLDTTEIENRPEFITEFSKLTDRWQNAVQGVRQRKGDVDGLVRQWQDFTTSVENLFRFLTDTSHLLSAVKGQERFSLYQTRSLIHELKNKEIHFQRRRTTCALTLEAGEKLLLTTDLKTKESVGRRISQLQDSWKDMEPQLAEMIKQFQSTVETWDQCEKKIKELKSRLQVLKAQSEDPLPELHEDLHNEKELIKELEQSLASWTQNLKELQTMKADLTRHVLVEDVMVLKEQIEHLHRQWEDLCLRVAIRKQEIEDRLNTWVVFNEKNKELCAWLVQMENKVLQTADISIEEMIEKLQKDCMEEINLFSENKLQLKQMGDQLIKASNKSRAAEIDDKLNKINDRWQHLFDVIGSRVKKLKETFAFIQQLDKNMSNLRTWLARIESELSKPVVYDVCDDQEIQKRLAEQQDLQRDIEQHSAGVESVFNICDVLLHDSDACANETECDSIQQTTRSLDRRWRNICAMSMERRMKIEETWRLWQKFLDDYSRFEDWLKSAERTAACPNSSEVLYTSAKEELKRFEAFQRQIHERLTQLELINKQYRRLARENRTDTASRLKQMVHEGNQRWDNLQRRVTAVLRRLRHFTNQREEFEGTRESILVWLTEMDLQLTNVEHFSESDADDKMRQLNGFQQEITLNTNKIDQLIVFGEQLIQKSEPLDAVLIEDELEELHRYCQEVFGRVSRFHRRLTSCTPGLEDEKEASENETDMEDPREIQTDSWRKRGESEEPSSPQSLCHLVAPGHERSGCETPVSVDSIPLEWDHTGDVGGSSSHEEDEEGPYYSALSGKSISDGHSWHVPDSPSCPEHHYKQMEGDRNVPPVPPASSTPYKPPYGKLLLPPGTDGGKEGPRVLNGNPQQEDGGLAGITEQQSGAFDRWEMIQAQELHNKLKIKQNLQQLNSDISAITTWLKKTEAELEMLKMAKPPSDIQEIELRVKRLQEILKAFDTYKALVVSVNVSSKEFLQTESPESTELQSRLRQLSLLWEAAQGAVDSWRGGLRQSLMQCQDFHQLSQNLLLWLASAKNRRQKAHVTDPKADPRALLECRRELMQLEKELVERQPQVDMLQEISNSLLIKGHGEDCIEAEEKVHVIEKKLKQLREQVSQDLMALQGTQNPASPLPSFDEVDSGDQPPATSVPAPRAKQFRAVRTTEGEEETESRVPGSTRPQRSFLSRVVRAALPLQLLLLLLLLLACLLPSSEEDYSCTQANNFARSFYPMLRYTNGPPPT

SEQ ID NO: 1549 - protein, 431 aa, homo sapiens
MAEITNIRPSFDVSPVVAGLIGASVLVVCVSVTVFVWSCCHQQAEKKQKNPPYKFIHMLKGISIYPETLSNKKKIIKVRRDKDGPGREGGRRNLLVDAAEAGLLSRDKDPRGPSSGSCIDQLPIKMDYGEELRSPITSLTPGESKTTSPSSPEEDVMLGSLTFSVDYNFPKKALVVTIQEAHGLPVMDDQTQGSDPYIKMTILPDKRHRVKTRVLRKTLDPVFDETFTFYGIPYSQLQDLVLHFLVLSFDRFSRDDVIGEVMVPLAGVDPSTGKVQLTRDIIKRNIQKCISRGELQVSLSYQPVAQRMTVVVLKARHLPKMDITGLSGNPYVKVNVYYGRKRIAKKKTHVKKCTLNPIFNESFIYDIPTDLLPDISIEFLVIDFDRTTKNEVVGRLILGAHSVTASGAEHWREVCESPRKPVAKWHSLSEY

SEQ ID NO: 1550 - protein, 527 aa, homo sapiens
MSDTLTADVIGRRVEVNGEHATVRFAGVVPPVAGPWLGVEWDNPERGKHDGSHEGTVYFKCRHPTGGSFIRPNKVNFGTDFLTAIKNRYVLEDGPEEDRKEQIVTIGNKPVETIGFDSIMKQQSQLSKLQEVSLRNCAVSCAGEKGGVAEACPNIRKVDLSKNLLSSWDEVIHIADQLRHLEVLNVSENKLKFPSGSVLTGTLSVLKVLVLNQTGITWAEVLRCVAGCPGLEELYLESNNIFISERPTDVLQTVKLLDLSSNQLIDENQLYLIAHLPRLEQLILSDTGISSLHFPDAGIGCKTSMFPSLKYLVVNDNQISQWSFFNELEKLPSLRALSCLRNPLTKEDKEAETARLLIIASIGQLKTLNKCEILPEERRRAELDYRKAFGNEWKQAGGHKDPEKNRLSEEFLTAHPRYQFLCLKYGAPEDWELKTQQPLMLKNQLLTLKIKYPHQLDQKVLEKQLPGSMTIQKVKGLLSRLLKVPVSDLLLSYESPKKPGREIELENDLKSLQFYSVENGDCLLVRW

SEQ ID NO: 1551 - protein, 682 aa, homo sapiens
MNPQQQRMAAIGTDKELSDLLDFSAMFSPPVNSGKTRPTTLGSSQFSGSGIDERGGTTSWGTSGQPSPSYDSSRGFTDSPHYSDHLNDSRLGAHEGLSPTPFMNSNLMGKTSERGSFSLYSRDTGLPGCQSSLLRQDLGLGSPAQLSSSGKPGTAYYSFSATSSRRRPLHDSAALDPLQAKKVRKVPPGLPSSVYAPSPNSDDFNRESPSYPSPKPPTSMFASTFFMQDGTHNSSDLWSSSNGMSQPGFGGILGTSTSHMSQSSSYGNLHSHDRLSYPPHSVSPTDINTSLPPMSSFHRGSTSSSPYVAASHTPPINGSDSILGTRGNAAGSSQTGDALGKALASIYSPDHTSSSFPSNPSTPVGSPSPLTGTSQWPRPGGQAPSSPSYENSLHSLQSRMEDRLDRLDDAIHVLRNHAVGPSTSLPAGHSDIHSLLGPSHNAPIGSLNSNYGGSSLVASSRSASMVGTHREDSVSLNGNHSVLSSTVTTSSTDLNHKTQENYRGGLQSQSGTVVTTEIKTENKEKDENLHEPPSSDDMKSDDESSQKDIKVSSRGRTSSTNEDEDLNPEQKIEREKERRMANNARERLRVRDINEAFKELGRMCQLHLKSEKPQTKLLILHQAVAVILSLEQQVRERNLNPKAACLKRREEEKVSAVSAEPPTTLPGTHPGLSETTNPMGHM

SEQ ID NO: 1552 - protein, 596 aa, homo sapiens
MPQLNGGGGDDLGANDELISFKDEGEQEEKSSENSSAERDLADVKSSLVNESETNQNSSSDSEAERRPPPRSESFRDKSRESLEEAAKRQDGGLFKGPPYPGYPFIMIPDLTSPYLPNGSLSPTARTYLQMKWPLLDVQAGSLQSRQALKDARSPSPAHIVSNKVPVVQHPHHVHPLTPLITYSNEHFTPGNPPPHLPADVDPKTGIPRPPHPPDISPYYPLSPGTVGQIPHPLGWLVPQQGQPVYPITTGGFRHPYPTALTVNASMSRFPPHMVPPHHTLHTTGIPHPAIVTPTVKQESSQSDVGSLHSSKHQDSKKEEEKKKPHIKKPLNAFMLYMKEMRAKVVAECTLKESAAINQILGRRWHALSREEQAKYYELARKERQLHMQLYPGWSARDNYGKKKKRKRDKQPGETNEHSECFLNPCLSLPPITDLSAPKKCRARFGLDQQNNWCGPCRRKKKCVRYIQGEGSCLSPPSSDGSLLDSPPPSPNLLGSPPRDAKSQTEQTQPLSLSLKPDPLAHLSMMPPPPALLLAEATHKASALCPNGALDLPPAALQPAAPSSSIAQPSTSSLHSHSSLAGTQPQPLSLVTKSLE

SEQ ID NO: 1553 - protein, 837 aa, homo sapiens
MSLSHLYRDGEGRIDDDDDERENFEITDWDLQNEFNPNRQRHWQTKEEATYGVWAERDSDDERPSFGGKRARDYSAPVNFISAGLKKGAAEEAELEDSDDEEKPVKQDDFPKDFGPRKLKTGGNFKPSQKGFAGGTKSFMDFGSWERHTKGIGQKLLQKMGYVPGRGLGKNAQGIINPIEAKQRKGKGAVGAYGSERTTQSMQDFPVVDSEEEAEEEFQKELSQWRKDPSGSKKKPKYSYKTVEELKAKGRISKKLTAPQKELSQVKVIDMTGREQKVYYSYSQISHKHNVPDDGLPLQSQQLPQSGKEAKAPGFALPELEHNLQLLIDLTEQEIIQNDRQLQYERDMVVNLFHELEKMTEVLDHEERVISNLSKVLEMVEECERRMQPDCSNPLTLDECARIFETLQDKYYEEYRMSDRVDLAVAIVYPLMKEYFKEWDPLKDCTYGTEIISKWKSLLENDQLLSHGGQDLSADAFHRLIWEVWMPFVRNIVTQWQPRNCDPMVDFLDSWVHIIPVWILDNILDQLIFPKLQKEVENWNPLTDTVPIHSWIHPWLPLMQARLEPLYSPIRSKLSSALQKWHPSDSSAKLILQPWKDVFTPGSWEAFMVKNIVPKLGMCLGELVINPHQQHMDAFYWVIDWEGMISVSSLVGLLEKHFFPKWLQVLCSWLSNSPNYEEITKWYLGWKSMFSDQVLAHPSVKDKFNEALDIMNRAVSSNVGAYMQPGARENIAYLTHTERRKDFQYEAMQERREAENMAQRGIGVAASSVPMNFKDLIETKAEEHNIVFMPVIGKRHEGKQLYTFGRIVIYIDRGVVFVQGEKTWVPTSLQSLIDMAK

SEQ ID NO: 1554 - protein, 853 aa, homo sapiens
MCCEKWSRVAEMFLFIEEREDCKILCLCSRAFVEDRKLYNLGLKGYYIRDSGNNSGDQATEEEEGGYSCGTAESHDSKGIGLDESELDSEAELMRSMGLPLQFGRITAHKDFEVSMNTRNKVKIKKKKHQKKYLDEIVQESWRKEYEEDDILASDDPSSIEQYENTRTYELQSKKDTETENPPVENTLSPKLEITEKWEKYWNEYGGGLLWQSWQEKHPGQALSSEPWNFPDTKEEWEQHYSQLYWYYLEQFQYWEAQGWTFDASQSCDTDTYTSKTEADDKNDEKCMKVDLVSFPSSPIMVDNDSSGTSDKDHSEILDGISNIKLNSEEVTQSQLDSCTSHDGHQQLSEVSSKRECPASGQSEPRNGGTNEESNSSGNTNTDPPAEDSQKSSGANTSKDRPHASGTDGDESEEDPPEHKPSKLKRSHELDIDENPASDFDDSGSLLGFKYGSGQKYGGIPNFSHRQVRYLEKNVKLKSKYLDMRRQIKMKNKHIFFTKESEKPFFKKSKILSKVEKFLTWVNKPMDEEASQESSSHDNVHDASTSSDSEEQDMSVKKGDDLLETNNPEPEKCQSVSSAGELETENYERDSLLATVPDEQDCVTQEVPDSRQAETEAEVKKKKNKKKNKKVNGLPPEIAAVPELAKYWAQRYRLFSRFDDGIKLDREGWFSVTPEKIAEHIAGRVSQSFKCDVVVDAFCGVGGNTIQFALTGMRVIAIDIDPVKIALARNNAEVYGIADKIEFICGDFLLLASFLKADVVFLSPPWGGPDYATAETFDIRTMMSPDGFEIFRLSKKITNNIVYFLPRNADIDQVASLAGPGGQVEIEQNFLNNKLKTITAYFGDLIRRPASET

SEQ ID NO: 1555 - protein, 1593 aa, homo sapiens
MAAAAVVVPAEWIKNWEKSGRGEFLHLCRILSENKSHDSSTYRDFQQALYELSYHVIKGNLKHEQASNVLSDISEFREDMPSILADVFCILDIETNCLEEKSKRDYFTQLVLACLYLVSDTVLKERLDPETLESLGLIKQSQQFNQKSVKIKTKLFYKQQKFNLLREENEGYAKLIAELGQDLSGSITSDLILENIKSLIGCFNLDPNRVLDVILEVFECRPEHDDFFISLLESYMSMCEPQTLCHILGFKFKFYQEPNGETPSSLYRVAAVLLQFNLIDLDDLYVHLLPADNCIMDEHKREIAEAKQIVRKLTMVVLSSEKMDEREKEKEKEEEKVEKPPDNQKLGLLEALLKIGDWQHAQNIMDQMPPYYAASHKLIALAICKLIHITIEPLYRRVGVPKGAKGSPVNALQNKRAPKQAESFEDLRRDVFNMFCYLGPHLSHDPILFAKVVRIGKSFMKEFQSDGSKQEDKEKTEVILSCLLSITDQVLLPSLSLMDCNACMSEELWGMFKTFPYQHRYRLYGQWKNETYNSHPLLVKVKAQTIDRAKYIMKRLTKENVKPSGRQIGKLSHSNPTILFDYILSQIQKYDNLITPVVDSLKYLTSLNYDVLAYCIIEALANPEKERMKHDDTTISSWLQSLASFCGAVFRKYPIDLAGLLQYVANQLKAGKSFDLLILKEVVQKMAGIEITEEMTMEQLEAMTGGEQLKAEGGYFGQIRNTKKSSQRLKDALLDHDLALPLCLLMAQQRNGVIFQEGGEKHLKLVGKLYDQCHDTLVQFGGFLASNLSTEDYIKRVPSIDVLCNEFHTPHDAAFFLSRPMYAHHISSKYDELKKSEKGSKQQHKVHKYITSCEMVMAPVHEAVVSLHVSKVWDDISPQFYATFWSLTMYDLAVPHTSYEREVNKLKVQMKAIDDNQEMPPNKKKKEKERCTALQDKLLEEEKKQMEHVQRVLQRLKLEKDNWLLAKSTKNETITKFLQLCIFPRCIFSAIDAVYCARFVELVHQQKTPNFSTLLCYDRVFSDIIYTVASCTENEASRYGRFLCCMLETVTRWHSDRATYEKECGNYPGFLTILRATGFDGGNKADQLDYENFRHVVHKWHYKLTKASVHCLETGEYTHIRNILIVLTKILPWYPKVLNLGQALERRVHKICQEEKEKRPDLYALAMGYSGQLKSRKSYMIPENEFHHKDPPPRNAVASVQNGPGGGPSSSSIGSASKSDESSTEETDKSRERSQCGVKAVNKASSTTPKGNSSNGNSGSNSNKAVKENDKEKGKEKEKEKKEKTPATTPEARVLGKDGKEKPKEERPNKDEKARETKERTPKSDKEKEKFKKEEKAKDEKFKTTVPNAESKSTQEREREKEPSRERDIAKEMKSKENVKGGEKTPVSGSLKSPVPRSDIPEPEREQKRRKIDTHPSPSHSSTVKDSLIELKESSAKLYINHTPPPLSKSKEREMDKKDLDKSRERSREREKKDEKDRKERKRDHSNNDREVPPDLTKRRKEENGTMGVSKHKSESPCESPYPNEKDKEKNKSKSSGKEKGSDSFKSEKMDKISSGGKKESRHDKEKIEKKEKRDSSGGKEEKKHHKSSDKHR

SEQ ID NO: 1556 - protein, 375 aa, homo sapiens
MEDEMPKTLYVGNLSRDVTEALILQLFSQIGPCKNCKMIMDTAGNDPYCFVEFHEHRHAAAALAAMNGRKIMGKEVKVNWATTPSSQKKDTSNHFHVFVGDLSPEITTEDIKAAFAPFGRISDARVVKDMATGKSKGYGFVSFFNKWDAENAIQQMGGQWLGGRQIRTNWATRKPPAPKSTYESNTKQLSYDEVVNQSSPSNCTVYCGGVTSGLTEQLMRQTFSPFGQIMEIRVFPDKGYSFVRFNSHESAAHAIVSVNGTTIEGHVVKCYWGKETLDMINPVQQQNQIGYPQPYGQWGQWYGNAQQIGQYMPNGWQVPAYGMYGQAWNQQGFNQTQSSAPWMGPNYGVQPPQGQNGSMLPNQPSGYRVAGYETQ

SEQ ID NO: 1557 - protein, 766 aa, homo sapiens
MSVQSSSGSLEGPPSWSQLSTSPTPGSAAAARSLLNHTPPSGRPREGAMDELHSLDPRRQELLEARFTGVASGSTGSTGSCSVGAKASTNNESSNHSFGSLGSLSDKESETPEKKQSESSRGRKRKAENQNESSQGKSIGGRGHKISDYFEYQGGNGSSPVRGIPPAIRSPQNSHSHSTPSSSVRPNSPSPTALAFGDHPIVQPKQLSFKIIQTDLTMLKLAALESNKIQDLEKKEGRIDDLLRANCDLRRQIDEQQKLLEKYKERLNKCISMSKKLLIEKSTQEKLSSREKSMQDRLRLGHFTTVRHGASFTEQWTDGFAFQNLVKQQEWVNQQREDIERQRKLLAKRKPPTANNSQAPSTNSEPKQRKNKAVNGAENDPFVRPNLPQLLTLAEYHEQEEIFKLRLGHLKKEEAEIQAELERLERVRNLHIRELKRINNEDNSQFKDHPTLNERYLLLHLLGRGGFSEVYKAFDLYEQRYAAVKIHQLNKSWRDEKKENYHKHACREYRIHKELDHPRIVKLYDYFSLDTDTFCTVLEYCEGNDLDFYLKQHKLMSEKEARSIVMQIVNALRYLNEIKPPIIHYDLKPGNILLVDGTACGEIKITDFGLSKIMDDDSYGVDGMDLTSQGAGTYWYLPPECFVVGKEPPKISNKVDVWSVGVIFFQCLYGRKPFGHNQSQQDILQENTILKATEVQFPVKPVVSSEAKAFIRRCLAYRKEDRFDVHQLANDPYLLPHMRRSNSSGNLHMAGLTASPTPPSSSIITY

SEQ ID NO: 1558 - protein, 555 aa, homo sapiens
MAAAAWLQVLPVILLLLGAHPSPLSFFSAGPATVAAADRSKWHIPIPSGKNYFSFGKILFRNTTIFLKFDGEPCDLSLNITWYLKSADCYNEIYNFKAEEVELYLEKLKEKRGLSGKYQTSSKLFQNCSELFKTQTFSGDFMHRLPLLGEKQEAKENGTNLTFIGDKTAMHEPLQTWQDAPYIFIVHIGISSSKESSKENSLSNLFTMTVEVKGPYEYLTLEDYPLMIFFMVMCIVYVLFGVLWLAWSACYWRDLLRIQFWIGAVIFLGMLEKAVFYAEFQNIRYKGESVQGALILAELLSAVKRSLARTLVIIVSLGYGIVKPRLGVTLHKVVVAGALYLLFSGMEGVLRVTGAQTDLASLAFIPLAFLDTALCWWIFISLTQTMKLLKLRRNIVKLSLYRHFTNTLILAVAASIVFIIWTTMKFRIVTCQSDWRELWVDDAIWRLLFSMILFVIMVLWRPSANNQRFAFSPLSEEEEEDEQKEPMLKESFEGMKMRSTKQEPNGNSKVNKAQEDDLKWVEENVPSSVTDVALPALLDSDEERMITHFERSKME

SEQ ID NO: 1559 - protein, 234 aa, homo sapiens
MDPGLQQALNGMAPPGDTAMHVPAGSVASHLGTTSRSYFYLTTATLALCLVFTVATIMVLVVQRTDSIPNSPDNVPLKGGNCSEDLLCILKRAPFKKSWAYLQVAKHLNKTKLSWNKDGILHGVRYQDGNLVIQFPGLYFIICQLQFLVQCPNNSVDLKLELLINKHIKKQALVTVCESGMQTKHVYQNLSQFLLDYLQVNTTISVNVDTFQYIDTSTFPLENVLSIFLYSNSD

SEQ ID NO: 1560 - protein, 140 aa, homo sapiens [sequence omitted]

SEQ ID NO: 1561 - protein, 1979 aa, homo sapiens
MSSWLGGLGSGLGQSLGQVGGSLASLTGQISNFTKDMLMEGTEEVEAELPDSRTKEIEAIHAILRSENERLKKLCTDLEEKHEASEIQIKQQSTSYRNQLQQKEVEISHLKARQIALQDQLLKLQSAAQSVPSGAGVPATTASSSFAYGISHHPSAFHDDDMDFGDIISSQQEINRLSNEVSRLESEVGHWRHIAQTSKAQGTDNSDQSEICKLQNIIKELKQNRSQEIDDHQHEMSVLQNAHQQKLTEISRRHREELSDYEERIEELENLLQQGGSGVIETDLSKIYEMQKTIQVLQIEKVESTKKMEQLEDKIKDINKKLSSAENDRDILRREQEQLNVEKRQIMEECENLKLECSKLQPSAVKQSDTMTEKERILAQSASVEEVFRLQQALSDAENEIMRLSSLNQDNSLAEDNLKLKMRIEVLEKEKSLLSQEKEELQMSLLKLNNEYEVIKSTATRDISLDSELHDLRLNLEAKEQELNQSISEKETLIAEIEELDRQNQEATKHMILIKDQLSKQQNEGDSIISKLKQDLNDEKKRVHQLEDDKMDITKELDVQKEKLIQSEVALNDLHLTKQKLEDKVENLVDQLNKSQESNVSIQKENLELKEHIRQNEEELSRIRNELMQSLNQDSNSNFKDTLLKEREAEVRNLKQNLSELEQLNENLKKVAFDVKMENEKLVLACEDVRHQLEECLAGNNQLSLEKNTIVETLKMEKGEIEAELCWAKKRLLEEANKYEKTIEELSNARNLNTSALQLEHEHLIKLNQKKDMEIAELKKNIEQMDTDHKETKDVLSSSLEEQKQLTQLINKKEIFIEKLKERSSKLQEELDKYSQALRKNEILRQTIEEKDRSLGSMKEENNHLQEELERLREEQSRTAPVADPKTLDSVTELASEVSQLNTIKEHLEEEIKHHQKIIEDQNQSKMQLLQSLQEQKKEMDEFRYQHEQMNATHTQLFLEKDEEIKSLQKTIEQIKTQLHEERQDIQTDNSDIFQETKVQSLNIENGSEKHDLSKAETERLVKGIKERELEIKLLNEKNISLTKQIDQLSKDEVGKLTQIIQQKDLEIQALHARISSTSHTQDVVYLQQQLQAYAMEREKVFAVLNEKTRENSHLKTEYHKMMDIVAAKEAALIKLQDENKKLSTRFESSGQDMFRETIQNLSRIIREKDIEIDALSQKCQTLLAVLQTSSTGNEAGGVNSNQFEELLQERDKLKQQVKKMEEWKQQVMTTVQNMQHESAQLQEELHQLQAQVLVDSDNNSKLQVDYTGLIQSYEQNETKLKNFGQELAQVQHSIGQLCNTKDLLLGKLDIISPQLSSASLLTPQSAECLRASKSEVLSESSELLQQELEELRKSLQEKDATIRTLQENNHRLSDSIAATSELERKEHEQTDSEIKQLKEKQDVLQKLLKEKDLLIKAKSDQLLSSNENFTNKVNENELLRQAVTNLKERILILEMDIGKLKGENEKIVETYRGKETEYQALQETNMKFSMMLREKEFECHSMKEKALAFEQLLKEKEQGKTGELNQLLNAVKSMQEKTVVFQQERDQVMLALKQKQMENTALQNEVQRLRDKEFRSNQELERLRNHLLESEDSYTREALAAEDREAKLRKKVTVLEEKLVSSSNAMENASHQASVQVESLQEQLNVVSKQRDETALQLSVSQEQVKQYALSLANLQMVLEHFQQEEKAMYSAELEKQKQLIAEWKKNAENLEGKVISLQECLDEANAALDSASRLTEQLDVKEEQIEELKRQNELRQEMLDDVQKKLMSLANSSEGKVDKVLMRNLFIGHFHTPKNQRHEVLRLMGSILGVRREEMEQLFHDDQGGVTRWMTGWLGGGSKSVPNTPLRPNQQSVVNSSFSELFVKFLETESHPSIPPPKLSVHDMKPLDSPGRRKRDTNAPESFKDTAESRSGRRTDVNPFLAPRSAAVPLINPAGLGPGGPGHLLLKPISDVLPTFTPLPALPDNSAGVVLKDLLKQ

SEQ ID NO: 1562 - protein, 1141 aa, homo sapiens; identical to SEQ ID NO: 1262

SEQ ID NO: 1563 - protein, 843 aa, homo sapiens
MWTPELAILRGFPTEAERQQWKQEGVVGSESGSFLQLLLEGNYEAIFLNSMTQNIFNSTTTAEEKIDSYLEKQVVTFLDYSTDLDTTERQQLIFLLGVSSLQLFVQSNWTGPPVDLHPQDFLSSVLFQQFSEVKGLDAFVLSLLTLDGESIYSLTSKPILLLLARIILVNVRHKLTAIQSLPWWTLRCVNIHQHLLEERSPLLFTLAENCIDQVMKLQNLFVDDSGRYLAIQFHLECAYVFLYYYEYRKAKDQLDIAKDISQLQIDLTGALGKRTRFQENYVAQLILDVRREGDVLSNCEFTPAPTPQEHLTKNLELNDDTILNDIKLADCEQFQMPDLCAEEIAIILGICTNFQKNNPVHTLTEVELLAFTSCLLSQPKFWAIQTSALILRTKLEKGSTRRVERAMRQTQALADQFEDKTTSVLERLKIFYCCQVPPHWAIQRQLASLLFELGCTSSALQIFEKLEMWEDVVICYERAGQHGKAEEILRQELEKKETPSLYCLLGDVLGDHSCYDKAWELSRYRSARAQRSKALLHLRNKEFQECVECFERSVKINPMQLGVWFSLGCAYLALEDYQGSAKAFQRCVTLEPDNAEAWNNLSTSYIRLKQKVKAFRTLQEALKCNYEHWQIWENYILTSTDVGEFSEAIKAYHRLLDLRDKYKDVQVLKILVRAVIDGMTDRSGDVATGLKGKLQELFGRVTSRVTNDGEIWRLYAHVYGNGQSEKPDENEKAFQCLSKAYKCDTQSNCWEKDITSFKEVVQRALGLAHVAIKCSKNKSSSQEAVQMLSSVRLNLRGLLSKAKQLFTDVATGEMSRELADDITAMDTLVTELQDLSNQFRNQY

SEQ ID NO: 1564 - protein, 779 aa, homo sapiens
MTPEFDEEVVFENSPLYQYLQDLGHTDFEICSSLSPKTEKCTTEGQQKPPTRVLPKQGILLKVAETIKSWIFFSQCNKKDDLLHKLDIGFRLDSLHTILQQEVLLQEDVELIELLDPSILSAGQSQQQENGHLPTLCSLATPNIWDLSMLFAFISLLVMLPTWWIVSSWLVWGVILFVYLVIRALRLWRTAKLQVTLKKYSVHLEDMATNSRAFTNLVRKALRLIQETEVISRGFTLVSAACPFNKAGQHPSQHLIGLRKAVYRTLRANFQAARLATLYMLKNYPLNSESDNVTNYICVVPFKELGLGLSEEQISEEEAHNFTDGFSLPALKVLFQLWVAQSSEFFRRLALLLSTANSPPGPLLTPALLPHRILSDVTQGLPHAHSACLEELKRSYEFYRYFETQHQSVPQCLSKTQQKSRELNNVHTAVRSLQLHLKALLNEVIILEDELEKLVCTKETQELVSEAYPILEQKLKLIQPHVQASNNCWEEAISQVDKLLRRNTDKKGKPEIACENPHCTVVPLKQPTLHIADKDPIPEEQELEAYVDDIDIDSDFRKDDFYYLSQEDKERQKREHEESKRVLQELKSVLGFKASEAERQKWKQLLFSDHAVLKSLSPVDPVEPISNSEPSMNSDMGKVSKNDTEEESNKSATTDNEISRTEYLCENSLEGKNKDNSSNEVFPQGAEERMCYQCESEDEPQADGSGLTTAPPTPRDSLQPSIKQRLARLQLSPDFTFTAGLAAEVAARSLSFTTMQEQTFGGEEEEQIIEENKNEIEEK

SEQ ID NO: 1565 - protein, 500 aa, homo sapiens
MIISHFPKCVAVFALLALSVGALDTFIAAVYEHAVILPNRTETPVSKEEALLLMNKNIDVLEKAVKLAAKQGAHIIVTPEDGIYGWIFTRESIYPYLEDIPDPGVNWIPCRDPWRFGNTPVQQRLSCLAKDNSIYVVANIGDKKPCNASDSQCPPDGRYQYNTDVVFDSQGKLLARYHKYNLFAPEIQFDFPKDSELVTFDTPFGKFGIFTCFDIFSHDPAVVVVDESIDSILYPTAWYNTLPLLSAVPFHSAWAKAMGVNLLAANTHNTSMHMTGSGIYAPEAVKVYHYDMETESGQLLLSELKSRPRREPTYPAAVDWHAYASSVKPFSSEQSDFLGMIYFDEFTFTKLKRNTGNYTACQKDLCCHLTYKMSEKRTDEIYALGAFDGLHTVEGQYYLQICALLKCQTTDLETCGEPVGSAFTKFEDFSLSGTFGTRYVFPQIILSGSQLAPERHYEISRDGRLRSRSGAPLPVLVMALYGRVFEKDPPRLGQGSGKFQ

SEQ ID NO: 1566 - protein, 3095 aa, homo sapiens
MVFESVVVDVLNRFLGDYVVDLDTSQLSLGIWKGAVALKNLQIKENALSQLDVPFKVKVGHIGNLKLIIPWKNLYTQPVEAVLEEIYLLIVPSSRIKYDPLKEEKQLMEAKQQELKRIEEAKQKVVDQEQHLPEKQDTFAEKLVTQIIKNLQVKISSIHIRYEDDITNRDKPLSFGISLQNLSMQTTDQYWVPCLHDETEKLVRKLIRLDNLFAYWNVKSQMFYLSDYDNSLDDLKNGIVNENIVPEGYDFVFRPISANAKLVMNRRSDFDFSAPKINLEIELHNIAIEFNKPQYFSIMELLESVDMMAQNLPYRKFKPDVPLHHHAREWWAYAIHGVLEVNVCPRLWMWSWKHIRKHRQKVKQYKELYKKKLTSKKPPGELLVSLEELEKTLDVFNITIARQTAEVEVKKAGYKIYKEGVKDPEDNKGWFSWLWSWSEQNTNEQQPDVQPETLEEMLTPEEKALLYEAIGYSETAVDPTLLKTFEALKFFVHLKSMSIVLRENHQKPELVDIVIEEFSTLIVQRPGAQAIKFETKIDSFHITGLPDNSEKPRLLSSLDDAMSLFQITFEINPLDETVSQRCIIEAEPLEIIYDARTVNSIVEFFRPPKEVHLAQLTAATLTKLEEFRSKTATGLLYIIETQKVLDLKINLKASYIIVPQDGIFSPTSNLLLLDLGHLKVTSKSRSELPDVKQGEANLKEIMDRAYDSFDIQLTSVQLLYSRVGDNWREARKLSVSTQHILVPMHFNLELSKAMVFMDVRMPKFKIYGKLPLISLRISDKKLQGIMELIESIPKPEPVTEVSAPVKSFQIQTSTSLGTSQISQKIIPLLELPSVSEDDSEEEFFDAPCSPLEEPLQFPTGVKSIRTRKLQKQDCSVNMTTFKIRFEVPKVLIEFYHLVGDCELSVVEILVLGLGAEIEIRTYDLKANAFLKEFCLKCPEYLDENKKPVYLVTTLDNTMEDLLTLEYVKAEKNVPDLKSTYNNVLQLIKVNFSSLDIHLHTEALLNTINYLHNILPQSEEKSAPVSTTETEDKGDVIKKLALKLSTNEDIITLQILAELSCLQIFIQDQKCNISEIKIEGLDSEMIMRPSETEINAKLRNIIVLDSDITAIYKKAVYITGKEVFSFKMVSYMDATAGSAYTDMNVVDIQVNLIVGCIEVVFVTKFLYSILAFIDNFQAAKQALAEATVQAAGMAATGVKELAQRSSRMALDINIKAPVVVIPQSPVSENVFVADFGLITMTNTFHMITESQSSPPPVIDLITIKLSEMRLYRSRFINDAYQEVLDLLLPLNLEVVVERNLCWEWYQEVPCFNVNAQLKPMEFILSQEDITTIFKTLHGNIWYEKDGSASPAVTKDQYSATSGVTTNASHHSGGATVVTAAVVEVHSRALLVKTTLNISFKTDDLTMVLYSPGPKQASFTDVRDPSLKLAEFKLENIISTLKMYTDGSTFSSFSLKNCILDDKRPHVKKATPRMIGLTVGFDKKDMMDIKYRKVRDGCVTDAVFQEMYICASVEFLQTVANVFLEAYTTGTAVETSVQTWTAKEEVPTQESVKWEINVIIKNPEIVFVADMTKNDAPALVITTQCEICYKGNLENSTMTAAIKDLQVRACPFLPVKRKGKITTVLQPCDLFYQTTQKGTDPQVIDMSVKSLTLKVSPVIINTMITITSALYTTKETIPEETASSTAHLWEKKDTKTLKMWFLEESNETEKIAPTTELVPKGEMIKMNIDSIFIVLEAGIGHRTVPMLLAKSRFSGEGKNWSSLINLHCQLELEVHYYNEMFGVWEPLLEPLEIDQTEDFRPWNLGIKMKKKAKMAIVESDPEEENYKVPEYKTVISFHSKDQLNITLSKCGLVMLNNLVKAFTEAATGSSADFVKDLAPFMILNSLGLTISVSPSDSFSVLNIPMAKSYVLKNGESLSMDYIRTKDNDHFNAMTSLSSKLFFILLTPVNHSTADKIPLTKVGRRLYTVRHRESGVERSIVCQIDTVEGSKKVTIRSPVQIRNHFSVPLSVYEGDTLLGTASPENEFNIPLGSYRSFIFLKPEDENYQMCEGIDFEEIIKNDGALLKKKCRSKNPSKESFLINIVPEKDNLTSLSVYSEDGWDLPYIMHLWPPILLRNLLPYKIAYYIEGIENSVFTLSEGHSAQICTAQLGKARLHLKLLDYLNHDWKSEYHIKPNQQDISFVSFTCVTEMEKTDLDIAVHMTYNTGQTVVAFHSPYWMVNKTGRMLQYKADGIHRKHPPNYKKPVLFSFQPNHFFNNNKVQLMVTDSELSNQFSIDTVGSHGAVKCKGLKMDYQVGVTIDLSSFNITRIVTFTPFYMIKNKSKYHISVAEEGNDKWLSLDLEQCIPFWPEYASSKLLIQVERSEDPPKRIYFNKQENCILLRLDNELGGIIAEVNLAEHSTVITFLDYHDGAATFLLINHTKNELVQYNQSSLSEIEDSLPPGKAVFYTWADPVGSRRLKWRCRKSHGEVTQKDDMMMPIDLGEKTIYLVSFFEGLQRIILFTEDPRVFKVTYESEKAELAEQEIAVALQDVGISLVNNYTKQEVAYIGITSSDVVWETKPKKKARWKPMSVKHTEKLEREFKEYTESSPSEDKVIQLDTNVPVRLTPTGHNMKILQPHVIALRRNYLPALKVEYNTSAHQSSFRIQIYRIQIQNQIHGAVFPFVFYPVKPPKSVTMDSAPKPFTDVSIVMRSAGHSQISRIKYFKVLIQEMDLRLDLGFIYALTDLMTEAEVTENTEVELFHKDIEAFKEEYKTASLVDQSQVSLYEYFHISPIKLHLSVSLSSGREEAKDSKQNGGLIPVHSLNLLLKSIGATLTDVQDVVFKLAFFELNYQFHTTSDLQSEVIRHYSKQAIKQMYVLILGLDVLGNPFGLIREFSEGVEAFFYEPYQGAIQGPEEFVEGMALGLKALVGGAVGGLAGAASKITGAMAKGVAAMTMDEDYQQKRREAMNKQPAGFREGITRGGKGLVSGFVSGITGIVTKPIKGAQKGGAAGFFKGVGKGLVGAVARPTGGIIDMASSTFQGIKRATETSEVESLRPPRFFNEDGVIRPYRLRDGTGNQMLQKIQFYREWIMTHSSSSDDDDDDDDDDESDLNH

SEQ ID NO: 1567 - protein, 863 aa, homo sapiens
MLESYVTPILMSYVNRYIKNLKPSDLQLSLWGGDVVLSKLELKLDVLEQELKLPFTFLSGHIHELRIHVPWTKLGSEPVVITINTMECILKLKDGIQDDHESCGSNSTNRSTAESTKSSIKPRRMQQAAPTDPDLPPGYVQSLIRRVVNNVNIVINNLILKYVEDDIVLSVNITSAECYTVGELWDRAFMDISATDLVLRKVINFSDCTVCLDKRNASGKIEFYQDPLLYKCSFRTRLHFTYENLNSKMPSVIKIHTLVESLKLSITDQQLPMFIRIMQLGIALYYGEIGNFKEGEIEDLTCHNKDMLGNITGSEDETRIDMQYPAQHKGQELYSQQDEEQPQGWVSWAWSFVPAIVSYDDGEEDFVGNDPASTMHQQKAQTLKDPIVSIGFYCTKATVTFKLTEMQVESSYYSPQKVKSKEVLCWEQEGTTVEALMMGEPFFDCQIGFVGCRAMCLKGIMGVKDFEENMNRSETEACFFICGDNLSTKGFTYLTNSLFDYRSPENNGTRAEFILDSTHHKETYTEIAGMQRFGAFYMDYLYTMENTSGKGSTNQQDFSSGKSEDLGTVQEKSTKSLVIGPLDFRLDSSAVHRILKMIVCALEHEYEPYSRLKSDIKDENETILNPEEVALLEEYIPTRHTSVTLLKCTCTISMAEFNLLDHLLPVIMGEKNSSNFMNTTNFQSLRPLPSIRILVDKINLEHSVPMYAEQLVHVVSSLTQPSDNLLHYCYVHCYLKIFGFQAGLTSLDCSGSYCLPVPVIPSFSTALYGKLLKLPTCWTKRSQIAITEGIFELPNLTIQATRAQTLLLQAIYQSWSHLGNVSSSAVIEALINEIFLSIEIGSCYVAQVDLELLASNDPPTSTS

SEQ ID NO: 1568 - protein, 3710 aa, homo sapiens
MVLESVVADLLNRFLGDYVENLNKSQLKLGIWGGNVALDNLQIKENALSELDVPFKVKAGQIDKLTLKIPWKNLYGEAVVATLEGLYLLVVPGASIKYDAVKEEKSLQDVKQKELSRIEEALQKAAEKDKPKEAKKDTFVEKLATQVIKNVQVKITDIHIKYEDDVTDPKRPLSFGVTLGELSLLTANEHWTPCILNEADKIIYKLIRLDSLSAYWNVNCSMSYQRSREQILDQLKNEILTSGNIPPNYQYIFQPISASAKLYMNPYAESELKTPKLDCNIEIQNIAIELTKPQYLSMIDLLESVDYMVRNAPYRKYKPYLPLHTNGRRWWKYAIDSVLEVHIRRYTQMWSWSNIKKHRQLLKSYKIAYKNKLTQSKVSEEIQKEIQDLEKTLDVFNIILARQQAQVEVIRSGQKLRKKSADTGEKRGGWFSGLWGKKESKKKDEESLIPETIDDLMTPEEKDKLFTAIGYSESTHNLTLPKQYVAHIMTLKLVSTSVTIRENKNIPEILKIQIIGLGTQVSQRPGAQALKVEAKLEHWYITGLRQQDIVPSLVASIGDTTSSLLKIKFETNPEDSPADQTLIVQSQPVEVIYDAKTVNAVVEFFQSNKGLDLEQITSATLMKLEEIKERTATGLTHIIETRKVLDLRINLKPSYLVVPQTGFHHEKSDLLILDFGTFQLNSKDQGLQKTTNSSLEEIMDKAYDKFDVEIKNVQLLFARAEETWKKCRFQHPSTMHILQPMDIHVELAKAMVEKDIRMARFKVSGGLPLMHVRISDQKMKDVLYLMNSIPLPQKSSAQSPERQVSSIPIISGGTKGLLGTSLLLDTVESESDDEYFDAEDGEPQTCKSMKGSELKKAAEVPNEELINLLLKFEIKEVILEFTKQQKEEDTILVFNVTQLGTEATMRTFDLTVVSYLKKISLDYHEIEGSKRKPLHLISSSDKPGLDLLKVEYIKADKNGPSFQTAFGKTEQTVKVAFSSLNLLLQTQALVASINYLTTIIPSDDQSISVAKEVQISTEKQQKNSTLPKAIVSSRDSDIIDFRLFAKLNAFCVIVCNEKNNIAEIKIQGLDSSLSLQSRKQSLFARLENIIVTDVDPKTVHKKAVSIMGNEVFRFNLDLYPDATEGDLYTDMSKVDGVLSLNVGCIQIVYLHKFLMSLLNFLNNFQTAKESLSAATAQAAERAATSVKDLAQRSFRVSINIDLKAPVIVIPQSSISTNAVVVDLGLIRVHNQFSLVSDEDYLNPPVIDRMDVQLTKLTLYRTVIQPGIYHPDIQLLHPINLEFLVNRNLAASWYHKVPVVEIKGHLDSMNVSLNQEDLNLLFRILTENLCEGTEDLDKVKPRVQETGEIKEPLEISISQDVHDSKNTLTTGVEEIRSVDIINMLLNFEIKEVVVTLMKKSEKKGRPLHELNVLQLGMEAKVKTYDMTAKAYLKKISMQCFDFTDSKGEPLHIINSSNVTDEPLLKMLLTKADSDGPEFKTIHDSTKQRLKVSFASLDLVLHLEALLSFMDFLSSAAPFSEPSSSEKESELKPLVGESRSIAVKAVSSNISQKDVFDLKITAELNAFNVFVCDQKCNIADIKIHGMDASISVKPKQTDVFARLKDIIVMNVDLQSIHKKAVSILGDEVFRFQLTLYPDATEGEAYADMSKVDGKLSFKVGCIQIVYVHKFFMSLLNFLNNFQTAKEALSTATVQAAERAASSMKDLAQKSFRLLMDINLKAPVIIIPQSSVSPNAVIADLGLIRVENKFSLVPMEHYSLPPVIDKMNIELTQLKLSRTILQASLPQNDIEILKPVNMLLSIQRNLAAAWYVQIPGMEIKGKLKPMQVALSEDDLTVLMKILLENLGEASSQPSPTQSVQETVRVRKVDVSSVPDHLKEQEDWTDSKLSMNQIVSLQFDFHFESLSIILYNNDINQESGVAFHNDSFQLGELRLHLMASSGKMFKDGSMNVSVKLKTCTLDDLREGIERATSRMIDRKNDQDNNSSMIDISYKQDKNGSQIDAVLDKLYVCASVEFLMTVADFFIKAVPQSPENVAKETQILPRQTATGKVKIEKDDSVRPNMTLKAMITDPEVVFVASLTKADAPALTASFQCNLSLSTSKLEQMMEASVRDLKVLACPFLREKRGKNITTVLQPCSLFMEKCTWASGKQNINIMVKEFIIKISPIILNTVLTIMAALSPKTKEDGSKDTSKEMENLWGIKSINDYNTWFLGVDTATEITESFKGIEHSLIEENCGVVVESIQVTLECGLGHRTVPLLLAESKFSGNIKNWTSLMAAVADVTLQVHYYNEIHAVWEPLIERVEGKRQWNLRLDVKKNPVQDKSLLPGDDFIPEPQMAIHISSGNTMNITISKSCLNVFNNLAKGFSEGTASTFDYSLKDRAPFTVKNAVGVPIKVKPNCNLRVMGFPEKSDIFDVDAGQNLELEYASMVPSSQGNLSILSRQESSFFTLTIVPHGYTEVANIPVARPGRRLYNVRNPNASHSDSVLVQIDATEGNKVITLRSPLQIKNHFSIAFIIYKFVKNVKLLERIGIARPEEEFHVPLDSYRCQLFIQPAGILEHQYKESTTYISWKEELHRSREVRCMLQCPSVEVSFLPLIVNTVALPDELSYICTHGEDWDVAYIIHLYPSLTLRNLLPYSLRYLLEGTAETHELAEGSTADVLHSRISGEIMELVLVKYQGKNWNGHFRIRDTLPEFFPVCFSSDSTEVTTVDLSVHVRRIGSRMVLSVFSPYWLINKTTRVLQYRSEDIHVKHPADFRDIILFSFKKKNIFTKNKVQLKISTSAWSSSFSLDTVGSYGCVKCPANNMEYLVGVSIKMSSFNLSRIVTLTPFCTIANKSSLELEVGEIASDGSMPTNKWNYIASSECLPFWPESLSGKLCVRVVGCEGSSKPFFYNRQDNGTLLSLEDLNGGILVDVNTAEHSTVITFSDYHEGSAPALIMNHTPWDILTYKQSGSPEEMVLLPRQARLFAWADPTGTRKLTWTYAANVGEHDLLKDGCGQFPYDANIQIHWVSFLDGRQRVLLFTDDVALVSKALQAEEMEQADYEITLSLHSLGLSLVNNESKQEVSYIGITSSGVVWEVKPKQKWKPFSQKQIILLEQSYQKHQISRDHGWIKLDNNFEVNFDKDPMEMRLPIRSPIKRDFLSGIQIEFKQSSHQRSLRARLYWLQVDNQLPGAMFPVVFHPVAPPKSIALDSEPKPFIDVSVITRFNEYSKVLQFKYFMVLIQEMALKIDQGFLGAIIALFTPTTDPEAERRRTKLIQQDIDALNAELMETSMTDMSILSFFEHFHISPVKLHLSLSLGSGGEESDKEKQEMFAVHSVNLLLKSIGATLTDVDDLIFKLAYYEIRYQFYKRDQLIWSVVRHYSEQFLKQMYVLVLGLDVLGNPFGLIRGLSEGVEALFYEPFQGAVQGPEEFAEGLVIGVRSLFGHTVGGAAGVVSRITGSVGKGLAAITMDKEYQQKRREELSRQPRDFGDSLARGGKGFLRGVVGGVTGIITKPVEGAKKEGAAGFFKGIGKGLVGAVARPTGGIVDMASSTFQGIQRAAESTEEVSSLRPPRLIHEDGIIRPYDRQESEGSDLLENHIKKLEGETYRYHCAIPGSKKTILMVTNRRVLCIKEVEILGLMCVDWQCPFEDFVFPPSVSENVLKISVKEQGLFHKKDSANQGCVRKVYLKDTATAERACNAIEDAQSTRQQQKLMKQSSVRLLRPQLPS

SEQ ID NO: 1569 - protein, 654 aa, homo sapiens
MERSGPSEVTGSDASGPDPQLAVTMGFTGFGKKARTFDLEAMFEQTRRTAVERSRKTLEAREKEEEMNREKELRRQNEDIEPTSSRSNVVRDCSKSSSRDTSSSESEQSSDSSDDELIGPPLPPKMVGKPVNFMEEDILGPLPPPLNEEEEEAEEEEEEEEEEENPVHKIPDSHEITLKHGTKTVSALGLDPSGARLVTGGYDYDVKFWDFAGMDASFKAFRSLQPCECHQIKSLQYSNTGDMILVVSGSSQAKVIDRDGFEVMECIKGDQYIVDMANTKGHTAMLHTGSWHPKIKGEFMTCSNDATVRTWEVENPKKQKSVFKPRTMQGKKVIPTTCTYSRDGNLIAAACQNGSIQIWDRNLTVHPKFHYKQAHDSGTDTSCVTFSYDGNVLASRGGDDSLKLWDIRQFNKPLFSASGLPTMFPMTDCCFSPDDKLIVTGTSIQRGCGSGKLVFFERRTFQRVYEIDITDASVVRCLWHPKLNQIMVGTGNGLAKVYYDPNKSQRGAKLCVVKTQRKAKQAETLTQDYIITPHALPMFREPRQRSTRKQLEKDRLDPLKSHKPEPPVAGPGRGGRVGTHGGTLSSYIVKNIALDKTDDSNPREAILRHAKAAEDSPYWVSPAYSKTQPKTMFAQVESDDEEAKNEPEWKKRKI

SEQ ID NO: 1570 - protein, 1151 aa, homo sapiens
MMAAALGPPEVIAQLENAAKVLMAPPSMVNNEQRQHAEHIFLSFRKSKSPFAVCKHILETSKVDYVLFQAATAIMEAVVREWILLEKGSIESLRTFLLTYVLQRPNLQKYVREQILLAVAVIVKRGSLDKSIDCKSIFHEVSQLISSGNPTVQTLACSILTALLSEFSSSSKTSNIGLSMEFHGNCKRVFQEEDLRQIFMLTVEVLQEFSRRENLNAQMSSVFQRYLALANQVLSWNFLPPNLGRHYIAMFESSQNVLLKPTESWRETLLDSRVMELFFTVHRKIREDSDMAQDSLQCLAQLASLHGPIFPDEGSQVDYLAHFIEGLLNTINGIEIEDSEAVGISSIISNLITVFPRNVLTAIPSELFSSFVNCLTHLTCSFGRSAALEEVLDKDDMVYMEAYDKLLESWLTLVQDDKHFHKGFFTQHAVQVFNSYIQCHLAAPDGTRNLTANGVASREEEEISELQEDDRDQFSDQLASVGMLGRIAAEHCIPLLTSLLEERVTRLHGQLQRHQQQLLASPGSSTVDNKMLDDLYEDIHWLILVTGYLLADDTQGETPLIPPEIMEYSIKHSSEVDINTTLQILGSPGEKASSIPGYNRTDSVIRLLSAILRVSEVESRAIRADLTHLLSPQMGKDIVWFLKRWAKTYLLVDEKLYDQISLPFSTAFGADTEGSQWIIGYLLQKVISNLSVWSSEQDLANDTVQLLVTLVERRERANLVIQCENWWNLAKQFASRSPPLNFLSSPVQRTLMKALVLGGFAHMDTETKQQYWTEVLQPLQQRFLRVINQENFQQMCQQEEVKQEITATLEALCGIAEATQIDNVAILFNFLMDFLTNCIGLMEVYKNTPETVNLIIEVFVEVAHKQICYLGESKAMNLYEACLTLLQVYSKNNLGRQRIDVTAEEEQYQDLLLIMELLTNLLSKEFIDFSDTDEVFRGHEPGQAANRSVSAADVVLYGVNLILPLMSQDLLKFPTLCNQYYKLITFICEIFPEKIPQLPEDLFKSLMYSLELGMTSMSSEVCQLCLEALTPLAEQCAKAQETDSPLFLATRHFLKLVFDMLVLQKHNTEMTTAAGEAFYTLVCLHQAEYSELVETLLSSQQDPVIYQRLADAFNKLTASSTPPTLDRKQKMAFLKSLEEFMANVGGLLCVK

SEQ ID NO: 1571 - protein, 227 aa, homo sapiens
MFKRMAEFGPDSGGRVKGVTIVKPIVYGNVARYFGKKREEDGHTHQWTVYVKPYRNEDMSAYVKKIQFKLHESYGNPLRVVTKPPYEITETGWGEFEIIIKIFFIDPNERPVTLYHLLKLFQSDTNAMLGKKTVVSEFYDEMIFQDPTAMMQQLLTTSRQLTLGAYKHETEFAELEVKTREKLEAAKKKTSFEIAELKERLKASRETINCLKNEIRKLEEDDQAKDI

SEQ ID NO: 1572 - protein, 1430 aa, homo sapiens
MSRPSSVSPRQPAPGGGGGGGPSPCGPGGGGRAKGLKDIRIDEEVKIAVNIALERFRYGDQREMEFPSSLTSTERAFIHRLSQSLGLVSKSKGKGANRYLTVKKKDGSETAHAMMTCNLTHNTKHAVRSLIQRFPVTNKERTELLPKTERGNVFAVEAENREMSKTSGRLNNGIPQIPVKRGESEFDSFRQSLPVFEKQEEIVKIIKENKVVLIVGETGSGKTTQIPQFLLDDCFKNGIPCRIFCTQPRRLAAIAVAERVAAERRERIGQTIGYQIRLESRVSPKTLLTFCTNGVLLRTLMAGDSTLSTVTHVIVDEVHERDRFSDFLLTKLRDLLQKHPTLKLILSSAALDVNLFIRYFGSCPVIYIQGRPFEVKEMFLEDILRTTGYTNKEMLKYKKEKQQEEKQQTTLTEWYSAQENSFKPESQRQRTVLNVTDEYDLLDDGGDAVFSQLTEKDVNCLEPWLIKEMDACLSDIWLHKDIDAFAQVFHLILTENVSVDYRHSETSATALMVAAGRGFASQVEQLISMGANVHSKASNGWMALDWAKHFGQTEIVDLLESYSATLEFGNLDESSLVQTNGSDLSAEDRELLKAYHHSFDDEKVDLDLIMHLLYNICHSCDAGAVLIFLPGYDEIVGLRDRILFDDKRFADSTHRYQVFMLHSNMQTSDQKKVLKNPPAGVRKIILSTNIAETSITVNDVVFVIDSGKVKEKSFDALNFVTMLKMVWISKASAIQRKGRAGRCRPGICFRLFSRLRFQNMLEFQTPELLRMPLQELCLHTKLLAPVNCPIADFLMKAPEPPPALIVRNAVQMLKTIDAMDTWEDLTELGYHLADLPVEPHLGKMVLCAVVLKCLDPILTIACTLAYRDPFVLPTQASQKRAAMLCRKRFTAGAFSDHMALLRAFQAWQKARSDGWERAFCEKNFLSQATMEIIIGMRTQLLGQLRASGFVRARGGGDIRDVNTNSENWAVVKAALVAGMYPNLVHVDRENLVLTGPKEKKVRFHPASVLSQPQYKKIPPANGQAAAIKALPTDWLIYDEMTRAHRIANIRCCSAVTPVTILVFCGPARLASNALQEPSSFRVDGIPNDSSDSEMEDKTTANLAALKLDEWLHFTLEPEAASLLLQLRQKWHSLFLRRMRAPSKPWSQVDEATIRAIIAVLSTEEQSAGLQQPSGIGQRPRPMSSEELPLASSWRSNNSRKSSADTEFSDECTTAERVLMKSPSPALHPPQKYKDRGILHPKRGTEDRSDQSSLKSTDSSSYPSPCASPSPPSSGKGSKSPSPRPNMPVRYFIMKSSNLRNLEISQQKGIWSTTPSNERKLNRAFWESSIVYLVFSVQGSGHFQGFSRMSSEIGREKSQDWGSAGLGGVFKVEWIRKESLPFQFAHHLLNPWNDNKKVQISRDGQELEPLVGEQLLQLWERLPLGEKNTTD

SEQ ID NO: 1573 - protein, 602 aa, homo sapiens; identical to SEQ ID NO: 1272

SEQ ID NO: 1574 - protein, 953 aa, homo sapiens
MEESSSVAMLVPDIGEQEAILTAESIISPSLEIDEQRKTKPDPLIHVIQKLSKIVENEKSQKCLLIGKKRPRSSAATHSLETQELCEIPAKVIQSPAADTRRAEMSQTNFTPDTLAQNEGKAMSYQCSLCKFLSSSFSVLKDHIKQHGQQNEVILMCSECHITSRSQEELEAHVVNDHDNDANIHTQSKAQQCVSPSSSLCRKTTERNETIPDIPVSVDNLQTHTVQTASVAEMGRRKWYAYEQYGMYRCLFCSYTCGQQRMLKTHAWKHAGEVDCSYPIFENENEPLGLLDSSAAAAPGGVDAVVIAIGESELSIHNGPSVQVQICSSEQLSSSSPLEQSAERGVHLSQSVTLDPNEEEMLEVISDAEENLIPDSLLTSAQKIISSSPNKKGHVNVIVERLPSAEETLSQKRFLMNTEMEEGKDLSLTEAQIGREGMDDVYRADKCTVDIGGLIIGWSSSEKKDELMNKGLATDENAPPGRRRTNSESLRLHSLAAEALVTMPIRAAELTRANLGHYGDINLLDPDTSQRQVDSTLAAYSKMMSPLKNSSDGLTSLNQSNSTLVALPEGRQELSDGQVKTGISMSLLTVIEKLRERTDQNASDDDILKELQDNAQCQPNSDTSLSGNNVVEYIPNAERPYRCRLCHYTSGNKGYIKQHLRVHRQRQPYQCPICEHIADNSKDLESHMIHHCKTRIYQCKQCEESFHYKSQLRNHEREQHSLPDTLSIATSNEPRISSDTADGKCVQEGNKSSVQKQYRCDVCDYTSTTYVGVRNHRRIHNSDKPYRCSLCGYVCSHPPSLKSHMWKHASDQNYNYEQVNKAINDAISQSGRVLGKSPGKTQLKSSEESADPVTGSSENAVSSSELMSQTPSEVLGTNENEKLSPTSNTSYSLEKISSLAPPSMEYCVLLFCCCICGFESTSKENLLDHMKEHEGEIVNIILNKDHNTALNTN

SEQ ID NO: 1575 - protein, 354 aa, homo sapiens
MSAFDMSHDFFFCLTSEWEIQPRTKRSSLQQGFLKNQIFTGIQMQTRSYSGWKLCENCGEVFSEQFCLKTHMRAQNGGNTFEGNCYGKDSISVHKEASIGQELSKFNPCGKVFTLTPGLAVHLEILNGRQPYKCKECGKGFKYFASLDNHMGIHIGEKLCEFQECERAITTSSHLKQCVAVHTGKKSEKTKNCGKSFTNFSQLSAHAKTHKGEKSFECKECGRSFRNSSSFNVHIQIHTGIKPHKCTECGKAFTRSTHLTQHVRTHTGIKPYECKECGQAFTQYTGLAIHIRNHTGEKPYQCKECGKAFNRSSTLTQHRRIHTGEKPYECVECGKTFITSSHRSKHLKTHSGER

SEQ ID NO: 1576 - DNA, 1542 bp, Escherichia coli
aaattgaagagtttgatcatggctcagattgaacgctggcggcaggcctaacacatgcaagtcgaacggtaacaggaagaagcttgcttctttgctgacgagtggcggacgggtgagtaatgtctgggaaactgcctgatggagagggataactactggaaacggtagctaataccgcataacgtcgcaagaccaaagagggggaccttcgggcctcttgccatcggatgtgcccagatgggattagctagtaggtggggtaacggctcacctaggcgacgatccctagctggtctgagaggatgaccagccacactggaactgagacacggtccagactcctacgggaggcagcagtggggaatattgcacaatgggcgcaagcctgatgcagccatgccgcgtgtatgaagaaggccttcgggttgtaaagtactttcagcggggaggaagggagtaaagttaatacctttgctcattgacgttacccgcagaagaagcaccggctaactccgtgccagcagccgcggtaatacggagggtgcaagcgttaatcggaattactgggcgtaaagcgcacgcaggcggtttgttaagtcagatgtgaaatccccgggctcaacctgggaactgcatctgatactggcaagcttgagtctcgtagaggggggtagaattccaggtgtagcggtgaaatgcgtagagatctggaggaataccggtggcgaaggcggccccctggacgaagactgacgctcaggtgcgaaagcgtggggagcaaacaggattagataccctggtagtccacgccgtaaacgatgtcgacttggaggttgtgcccttgaggcgtggcttccggagctaacgcgttaagtcgaccgcctggggagtacggccgcaaggttaaaactcaaatgaattgacgggggcccgcacaagcggtggagcatgtggtttaattcgatgcaacgcgaagaaccttacctggtcttgacatccacagaactttccagagatggattggtgccttcgggaactgtgagacaggtgctgcatggctgtcgtcagctcgtgttgtgaaatgttgggttaagtcccgcaacgagcgcaacccttatcctttgttgccagcggtccggccgggaactcaaaggagactgccagtgataaactggaggaaggtggggatgacgtcaagtcatcatggcccttacgaccagggctacacacgtgctacaatggcgcatacaaagagaagcgacctcgcgagagcaagcggacctcataaagtgcgtcgtagtccggattggagtctgcaactcgactccatgaagtcggaatcgctagtaatcgtggatcagaatgccacggtgaatacgttcccgggccttgtacacaccgcccgtcacaccatgggagtgggttgcaaaagaagtaggtagcttaaccttcgggagggcgcttaccactttgtgattcatgactggggtgaagtcgtaacaaggtaaccgtaggggaacctgcggttggatcacctcctta

What is claimed is:

1. A method for determining an indicator used in assessing a likelihood of a subject having a presence, absence or degree of BaSIRS or VaSIRS, the method comprising: (1) determining a plurality of host response specific biomarker values including a plurality of BaSIRS biomarker values and a plurality of VaSIRS biomarker values, the plurality of BaSIRS biomarker values being indicative of values measured for a corresponding plurality of BaSIRS biomarkers in a sample taken from the subject, the plurality of VaSIRS biomarker values being indicative of values measured for a corresponding plurality of VaSIRS biomarkers in the sample; (2) determining a plurality of host response specific derived biomarker values including at least one BaSIRS derived biomarker value and at least one VaSIRS derived biomarker value, each derived BaSIRS biomarker value being determined using at least a subset of the plurality of BaSIRS biomarker values, and being indicative of a ratio of levels of a corresponding at least a subset of the plurality of BaSIRS biomarkers, and each derived VaSIRS biomarker value being determined using at least a subset of the plurality of VaSIRS biomarker values, and being indicative of a ratio of levels of a corresponding at least a subset of the plurality of VaSIRS biomarkers; and (3) determining the indicator using the plurality of host response specific derived biomarker values, wherein the at least a subset of BaSIRS biomarkers forms a BaSIRS derived biomarker combination which is not a derived biomarker combination for VaSIRS, PaSIRS or InSIRS, and wherein the at least a subset of VaSIRS biomarkers forms a VaSIRS derived biomarker combination which is not a derived biomarker combination for BaSIRS, PaSIRS or InSIRS.

2. The method of claim 1, wherein the BaSIRS derived biomarker combination and the VaSIRS derived biomarker combination are not derived biomarker combinations for any one or more inflammatory conditions selected from autoimmunity, asthma, stress, anaphylaxis, trauma and obesity. Alternatively, or in addition, the derived BaSIRS biomarkers and derived VaSIRS biomarkers are not derived biomarkers for any one or more of age, gender and race.

3. The method of claim 1 or claim 2, further comprising: (a) determining a plurality of pathogen specific biomarker values including at least one bacterial biomarker value and at least one viral biomarker value, the least one bacterial biomarker value being indicative of a value measured for a corresponding bacterial biomarker in the sample, the least one viral biomarker value being indicative of a value measured for a corresponding viral biomarker in the sample; and (b) determining the indicator using the host response specific derived biomarker values in combination with the pathogen specific biomarker values.

4. The method of any one of claims 1 to 3, wherein each BaSIRS derived biomarker value is determined using a pair of the BaSIRS biomarker values, and is indicative of a ratio of levels of a corresponding pair of BaSIRS biomarkers. Alternatively, or in addition, each VaSIRS derived biomarker value is determined using a pair of the VaSIRS biomarker values, and is indicative of a ratio of levels of a corresponding pair of VaSIRS biomarkers.

5. The method of any one of claims 1 to 4, wherein the plurality of host response specific biomarker values further includes a plurality of PaSIRS biomarker values, the plurality of PaSIRS biomarker values being indicative of values measured for a corresponding plurality of PaSIRS biomarkers in the sample, and the plurality of host response specific derived biomarker values further includes at least one PaSIRS derived biomarker value, and the methods further comprise: determining each PaSIRS derived biomarker value using at least a subset of the plurality of PaSIRS biomarker values, the PaSIRS derived biomarker value being indicative of a ratio of levels of a corresponding at least a subset of the plurality of PaSIRS biomarkers; and determining the indicator using the plurality of host response specific derived biomarker values, wherein the at least a subset of PaSIRS biomarkers forms a PaSIRS derived biomarker combination which is not a derived biomarker combination for BaSIRS, VaSIRS or InSIRS.

6. The method of any one of claims 1 to 5, wherein each PaSIRS derived biomarker value is determined using a pair of the PaSIRS biomarker values, and is indicative of a ratio of levels of a corresponding pair of PaSIRS biomarkers.

7. A method for determining an indicator used in assessing a likelihood of a subject having a presence, absence or degree of BaSIRS, VaSIRS or PaSIRS, the method comprising: (1) determining a plurality of host response specific biomarker values including a plurality of BaSIRS biomarker values, a plurality of VaSIRS biomarker values, and a plurality of PaSIRS biomarker values, the plurality of BaSIRS biomarker values being indicative of values measured for a corresponding plurality of BaSIRS biomarkers in a sample taken from the subject, the plurality of VaSIRS biomarker values being indicative of values measured for a corresponding plurality of VaSIRS biomarkers in the sample, the plurality of PaSIRS biomarker values being indicative of values measured for a corresponding plurality of PaSIRS biomarkers in the sample; (2) determining a plurality of host response specific derived biomarker values including at least one BaSIRS derived biomarker value, at least one VaSIRS derived biomarker value, and at least one PaSIRS derived biomarker value, each derived BaSIRS biomarker value being determined using at least a subset of the plurality of BaSIRS biomarker values, and being indicative of a ratio of levels of a corresponding at least a subset of the plurality of BaSIRS biomarkers, each derived VaSIRS biomarker value being determined using at least a subset of the plurality of VaSIRS biomarker values, and being indicative of a ratio of levels of a corresponding at least a subset of the plurality of VaSIRS biomarkers, and each derived PaSIRS biomarker value being determined using at least a subset of the plurality of PaSIRS biomarker values, and being indicative of a ratio of levels of a corresponding at least a subset of the plurality of PaSIRS biomarkers; and (3) determining the indicator using the plurality of host response specific derived biomarker values, wherein the at least a subset of BaSIRS biomarkers forms a BaSIRS derived biomarker combination which is not a derived biomarker combination for VaSIRS, PaSIRS or InSIRS, wherein the at least a subset of VaSIRS biomarkers forms a VaSIRS derived biomarker combination which is not a derived biomarker combination for BaSIRS, PaSIRS or InSIRS, and wherein the at least a subset of PaSIRS biomarkers forms a PaSIRS derived biomarker combination which is not a derived biomarker combination for BaSIRS, VaSIRS or InSIRS.

8. The method of any one of claims 1 to 7, further comprising: (a) determining a plurality of pathogen specific biomarker values including at least one bacterial biomarker value, at least one viral biomarker value and at least one protozoal biomarker value, the at least one bacterial biomarker value being indicative of a value measured for a corresponding bacterial biomarker in the sample, the least one viral biomarker value being indicative of a value measured for a corresponding viral biomarker in the sample, and the least one protozoal biomarker value being indicative of a value measured for a corresponding protozoal biomarker in the sample; and (b) determining the indicator using the host response specific derived biomarker values in combination with the pathogen specific biomarker values.

9. The method of any one of claims 1 to 8, wherein the plurality of host response specific biomarker values further includes a plurality of InSIRS biomarker values, the plurality of InSIRS biomarker values being indicative of values measured for a corresponding plurality of InSIRS biomarkers in the sample, and the plurality of host response specific derived biomarker values further includes at least one InSIRS derived biomarker value, and the methods further comprise: determining each InSIRS derived biomarker value using at least a subset of the plurality of InSIRS biomarker values, the InSIRS derived biomarker value being indicative of a ratio of levels of a corresponding at least a subset of the plurality of InSIRS biomarkers; and determining the indicator using the plurality of host response specific derived biomarker values, wherein the at least a subset of InSIRS biomarkers forms a InSIRS derived biomarker combination which is not a derived marker combination for BaSIRS, VaSIRS or PaSIRS.

10. A method for determining an indicator used in assessing a likelihood of a subject having a presence, absence or degree of BaSIRS, VaSIRS or InSIRS, the method comprising: (1) determining a plurality of host response specific biomarker values including a plurality of BaSIRS biomarker values, a plurality of VaSIRS biomarker values, and a plurality of InSIRS biomarker values, the plurality of BaSIRS biomarker values being indicative of values measured for a corresponding plurality of BaSIRS biomarkers in a sample taken from the subject, the plurality of VaSIRS biomarker values being indicative of values measured for a corresponding plurality of VaSIRS biomarkers in the sample, the plurality of InSIRS biomarker values being indicative of values measured for a corresponding plurality of InSIRS biomarkers in the sample; (2) determining a plurality of host response specific derived biomarker values including at least one BaSIRS derived biomarker value, at least one VaSIRS derived biomarker value, and at least one InSIRS derived biomarker value, each derived BaSIRS biomarker value being determined using at least a subset of the plurality of BaSIRS biomarker values, and being indicative of a ratio of levels of a corresponding at least a subset of the plurality of BaSIRS biomarkers, each derived VaSIRS biomarker value being determined using at least a subset of the plurality of VaSIRS biomarker values, and being indicative of a ratio of levels of a corresponding at least a subset of the plurality of VaSIRS biomarkers, and each derived InSIRS biomarker value being determined using at least a subset of the plurality of InSIRS biomarker values, and being indicative of a ratio of levels of a corresponding at least a subset of the plurality of InSIRS biomarkers; and (3) determining the indicator using the plurality of host response specific derived biomarker values, wherein the at least a subset of BaSIRS biomarkers forms a BaSIRS derived biomarker combination which is not a derived biomarker combination for VaSIRS, PaSIRS or InSIRS, wherein the at least a subset of VaSIRS biomarkers forms a VaSIRS derived biomarker combination which is not a derived biomarker combination for BaSIRS, PaSIRS or InSIRS, and wherein the at least a subset of InSIRS biomarkers forms an InSIRS derived biomarker combination which is not a derived biomarker combination for BaSIRS, VaSIRS or PaSIRS.

11. A method for determining an indicator used in assessing a likelihood of a subject having a presence, absence or degree of BaSIRS, VaSIRS, PaSIRS or InSIRS, the method comprising: (1) determining a plurality of host response specific biomarker values including a plurality of BaSIRS biomarker values, a plurality of VaSIRS biomarker values, a plurality of PaSIRS biomarker values, and a plurality of InSIRS biomarker values, the plurality of BaSIRS biomarker values being indicative of values measured for a corresponding plurality of BaSIRS biomarkers in a sample taken from the subject, the plurality of VaSIRS biomarker values being indicative of values measured for a corresponding plurality of VaSIRS biomarkers in the sample, the plurality of PaSIRS biomarker values being indicative of values measured for a corresponding plurality of PaSIRS biomarkers in the sample, the plurality of InSIRS biomarker values being indicative of values measured for a corresponding plurality of InSIRS biomarkers in the sample; (2) determining a plurality of host response specific derived biomarker values including at least one BaSIRS derived biomarker value, at least one VaSIRS derived biomarker value, at least one PaSIRS derived biomarker value, and at least one InSIRS derived biomarker value, each derived BaSIRS biomarker value being determined using at least a subset of the plurality of BaSIRS biomarker values, and being indicative of a ratio of levels of a corresponding at least a subset of the plurality of BaSIRS biomarkers, each derived VaSIRS biomarker value being determined using at least a subset of the plurality of VaSIRS biomarker values, and being indicative of a ratio of levels of a corresponding at least a subset of the plurality of VaSIRS biomarkers, each derived PaSIRS biomarker value being determined using at least a subset of the plurality of PaSIRS biomarker values, and being indicative of a ratio of levels of a corresponding at least a subset of the plurality of PaSIRS biomarkers, and each derived InSIRS biomarker value being determined using at least a subset of the plurality of InSIRS biomarker values, and being indicative of a ratio of levels of a corresponding at least a subset of the plurality of InSIRS biomarkers; and (3) determining the indicator using the plurality of host response specific derived biomarker values, wherein the at least a subset of BaSIRS biomarkers forms a BaSIRS derived biomarker combination which is not a derived biomarker combination for VaSIRS, PaSIRS or InSIRS, wherein the at least a subset of VaSIRS biomarkers forms a VaSIRS derived biomarker combination which is not a derived biomarker combination for BaSIRS, PaSIRS or InSIRS, wherein the at least a subset of PaSIRS biomarkers forms a PaSIRS derived biomarker combination which is not a derived biomarker combination for BaSIRS, VaSIRS or InSIRS, and wherein the at least a subset of InSIRS biomarkers forms an InSIRS derived biomarker combination which is not a derived biomarker combination for BaSIRS, VaSIRS or PaSIRS.

12. The method of any one of claims 1 to 11, wherein the indicator is determined by combining a plurality (e.g., 2, 3, 4, 5, 6, 7, 8, etc.) of derived biomarker values.

13. The method of claim 12, comprising combining the derived biomarker values using a combining function, wherein the combining function is at least one of: an additive model; a linear model; a support vector machine; a neural network model; a random forest model; a regression model; a genetic algorithm; an annealing algorithm; a weighted sum; a nearest neighbor model; and a probabilistic model.

14. The method of any one of claims 1 to 13, wherein individual BaSIRS derived biomarker combinations are selected from TABLE A.
TABLE A
BaSIRS Derived Biomarkers

| | | | |
|---|---|---|---|
| PDGFC:KLRF1 | PDGFC:CCNK | GALNT2:KLRD1 | GAS7:CAMK1D |
| TMEM165:PARP8 | CR1:ADAM19 | KIAA0101:IL2RB | MGAM:MME |
| ITGA7:KLRF1 | ITGA7:CCNK | CR1:HAL | GAS7:GAB2 |
| CR1:GAB2 | PCOLCE2:PRSS23 | PDGFC:RFC1 | PDGFC:INPP5D |
| PCOLCE2:KLRF1 | TMEM165:PRPF38B | ENTPD7:KLRF1 | ST3GAL2:PRKD2 |
| ITGA7:INPP5D | PDGFC:PHF3 | PDGFC:GRK5 | HK3:INPP5D |
| GALNT2:CCNK | GAS7:NLRP1 | PCOLCE2:PYHIN1 | ENTPD7:KLRD1 |
| PDGFC:KLRD1 | PCOLCE2:KLRD1 | GAS7:PRKDC | PDGFC:SIDT1 |
| PDGFC:SPIN1 | COX15:UTRN | MCTP1:PARP8 | TSPO:CAMK1D |
| PCOLCE2:YPEL1 | SMPDL3A:QRICH1 | TSPO:HCLS1 | OPLAH:POGZ |
| PDGFC:SYTL2 | PDGFC:LPIN2 | TSPO:CASS4 | ALPL:RNASE6 |
| PDGFC:TGFBR3 | TSPO:NLRP1 | GAS7:RBM23 | RAB32:NLRP1 |
| IGFBP7:KLRF1 | PCOLCE2:NMUR1 | GAS7:EPHB4 | TLR5:SEMA4D |
| PCOLCE2:RUNX2 | FAM129A:GAB2 | PDGFC:RBM15 | IMPDH1:NLRP1 |
| SMPDL3A:KLRD1 | ALPL:NLRP1 | ADM:CLEC7A | ALPL:CAMK1D |
| GALNT2:KLRF1 | TSPO:ZFP36L2 | PDGFC:LEPROTL1 | TSPO:NFIC |
| PDGFC:YPEL1 | ALPL:ZFP36L2 | PDGFC:NPAT | GAS7:HAL |
| HK3:DENND3 | PCOLCE2:FOXJ3 | TSPO:PLA2G7 | PDGFC:NCOA6 |
| PDGFC:CBLL1 | PDGFC:KIAA0355 | GALNT2:IK | PDGFC:PIK3C2A |
| OPLAH:KLRD1 | PDGFC:KIAA0907 | CD82:JARID2 | TSPO:ADAM19 |
| OPLAH:ZHX2 | GAS7:DOCK5 | PDGFC:ICK | CD82:NOV |
| PDGFC:RYK | CD82:CNNM3 | GALNT2:SAP130 | PDGFC:PDS5B |
| PDGFC:IKZF5 | GAS7:EXTL3 | PDGFC:FBXO28 | FIG4:INPP5D |
| GALNT2:INPP5D | TSPO:RNASE6 | TSPO:GAB2 | TSPO:NOV |
| PDGFC:GCC2 | ALPL:MME | COX15:INPP5D | |
| PDGFC:MBIP | HK3:TLE3 | ITGA7:LAG3 | |

15. The method of any one of claims 1 to 14, wherein a single BaSIRS derived biomarker combination (e.g., any one from TABLE A) is used for determining the indicator.

16. The method of any one of claims 1 to 14, wherein two BaSIRS derived biomarker combinations (e.g., any two from TABLE A) are used for determining the indicator.

17. The method of any one of claims 1 to 14, wherein three BaSIRS derived biomarker combinations (e.g., any three from TABLE A) are used for determining the indicator.

18. The method of any one of claims 1 to 14, wherein four BaSIRS derived biomarker combinations (e.g., any four from TABLE A) are used for determining the indicator.

19. The method of claim 15, comprising: (a) determining a single BaSIRS derived biomarker value using a pair of BaSIRS biomarker values, the single BaSIRS derived biomarker value being indicative of a ratio of levels of first and second BaSIRS biomarkers; and (b) determining the indicator using the single derived BaSIRS biomarker value.

20. The method of claim 16, comprising: (a) determining a first BaSIRS derived biomarker value using a first pair of BaSIRS biomarker values, the first BaSIRS derived biomarker value being indicative of a ratio of levels of first and second BaSIRS biomarkers; (b) determining a second BaSIRS derived biomarker value using a second pair of BaSIRS biomarker values, the second BaSIRS derived biomarker value being indicative of a ratio of levels of third and fourth BaSIRS biomarkers; and (c) determining the indicator by combining the first and second derived BaSIRS biomarker values, using for example a combining function as disclosed herein.

21. The method of claim 17, comprising: (a) determining a first BaSIRS derived biomarker value using a first pair of BaSIRS biomarker values, the first BaSIRS derived biomarker value being indicative of a ratio of levels of first and second BaSIRS biomarkers; (b) determining a second BaSIRS derived biomarker value using a second pair of BaSIRS biomarker values, the second BaSIRS derived biomarker value being indicative of a ratio of levels of third and fourth BaSIRS biomarkers; (c) determining a third BaSIRS derived biomarker value using a third pair of BaSIRS biomarker values, the third BaSIRS derived biomarker value being indicative of a ratio of levels of fifth and fourth BaSIRS biomarkers; and (d) determining the indicator by combining the first and sixth derived BaSIRS biomarker values, using for example a combining function as disclosed herein.

22. The method of any one of claims 1 to 21, wherein individual BaSIRS derived biomarker combinations are selected from TSPO:HCLS1, OPLAH:ZHX2, TSPO:RNASE6; GAS7:CAMK1D, ST3GAL2:PRKD2, PCOLCE2:NMUR1 and CR1:HAL.

23. The method of any one of claims 1 to 21, wherein individual BaSIRS derived biomarker combinations are selected from OPLAH:ZHX2 and TSPO:HCLS1.

24. The method of any one of claims 1 to 23, wherein the bacterium associated with the BaSIRS is selected from any Gram positive or Gram negative bacterial species which is capable of inducing at least one of the clinical signs of SIRS.

25. The method of any one of claims 1 to 13, wherein individual VaSIRS derived biomarker combinations are selected from TABLE B.
TABLE B
VaSIRS Derived Biomarker

| | | | |
|---|---|---|---|
| IFI6:IL16 | OASL:SP3 | IFI6:ABLIM1 | OASL:SMAD4 |
| OASL:NR3C1 | OASL:ABLIM1 | OAS2:FAIM3 | OASL:ST3GAL1 |
| OASL:EMR2 | OASL:AOAH | OASL:ARHGAP25 | OASL:ZNF292 |
| OASL:SORL1 | OASL:MBP | OASL:GNA12 | IFI44:IL4R |
| OASL:SERTAD2 | OASL:NLRP1 | OASL:NUMB | OASL:HPCAL1 |
| OASL:LPAR2 | OASL:PBX3 | OASL:CREBBP | OASL:IGSF6 |
| OASL:ITGAX | OASL:PTPN6 | OASL:PINK1 | OASL:MTMR3 |
| OASL:TGFBR2 | OASL:RYBP | OASL:PITPNA | OASL:PHF20 |
| OASL:KIAA0247 | OASL:IL13RA1 | OASL:SEMA4D | OASL:PPARD |
| OASL:ARHGAP26 | OASL:LCP2 | OASL:TGFBI | OASL:PPP4R1 |
| OASL:LYN | OASL:LRP10 | OASL:APLP2 | OASL:RBMS1 |
| OASL:PCBP2 | OASL:SYPL1 | OASL:CCNG2 | OASL:RHOG |
| OASL:TOPORS | OASL:VAMP3 | OASL:MKRN1 | OASL:TIAM1 |
| EIF2AK2:IL16 | IFI44:LTB | OASL:RGS14 | USP18:IL16 |
| OASL:NCOA1 | OASL:ARHGEF2 | OASL:LYST | OASL:CBX7 |
| OASL:PTGER4 | OASL:CTDSP2 | OASL:TNRC6B | OASL:RAF1 |
| OASL:TLR2 | OASL:LST1 | OASL:TYROBP | OASL:SERINC5 |
| OASL:PACSIN2 | OASL:MAPK1 | OASL:WDR37 | OASL:UBQLN2 |
| OASL:LILRA2 | OASL:N4BP1 | OASL:WDR47 | OASL:XPO6 |
| OASL:PTPRE | OASL:STAT5B | UBE2L6:IL16 | OASL:ATP6V1B2 |
| OASL:RPS6KA1 | IFI44:ABLIM1 | OASL:BTG1 | OASL:CSF2RB |
| OASL:CASC3 | IFI44:IL6ST | OASL:CD93 | OASL:GYPC |
| OASL:VEZF1 | OASL:BACH1 | OASL:DCP2 | OASL:IL4R |
| OASL:CRLF3 | OASL:KLF7 | OASL:FYB | OASL:MMP25 |
| OASL:NDEL1 | OASL:PRMT2 | OASL:MAML1 | OASL:PSEN1 |
| OASL:RASSF2 | OASL:HCK | OASL:SNRK | OASL:SH2B3 |
| OASL:TLE4 | OASL:ITPKB | OASL:USP4 | OASL:STAT5A |
| OASL:CD97 | OASL:MAP4K4 | OASL:YTHDF3 | ISG15:IL16 |
| OASL:CEP68 | OASL:PPM1F | OASL:CEP170 | MX1:LEF1 |
| OASL:RXRA | OASL:RAB14 | OASL:PLEKHO2 | OASL:CAMK2G |
| OASL:ETS2 | OASL:ST13 | OASL:KBTBD2 | OASL:PSAP |
| OASL:POLB | OASL:TFEB | OASL:PHC2 | OASL:STX3 |
| OASL:STK38L | OASL:ZFYVE16 | OASL:PUM2 | OASL:TNK2 |
| OASL:TFE3 | EIF2AK2:SATB1 | OASL:SSFA2 | EIF2AK2:ZNF274 |
| OASL:ICAM3 | OASL:ABAT | IFI44:MYC | OASL:ACAA1 |
| OASL:ITGB2 | OASL:ABI1 | OASL:ABHD2 | OASL:CHD3 |
| OASL:PISD | OASL:ACVR1B | OASL:CYLD | OASL:FRY |
| OASL:PLXNC1 | OASL:GPSM3 | OASL:MAST3 | OASL:GRB2 |
| OASL:SNX27 | OASL:MPPE1 | OASL:UBN1 | OASL:MAP3K11 |
| OASL:TNIP1 | OASL:PTEN | IFI6:IL6ST | OASL:NEK7 |
| OASL:ZMIZ1 | OASL:SEC62 | IFIH1:TGFBR2 | OASL:PPP2R5A |
| OASL:FOXO3 | IFI6:MYC | OASL:CNPY3 | USP18:ST13 |
| OASL:IL10RB | IFI6:PCF11 | OASL:KIAA0232 | XAF1:LEF1 |
| OASL:MAP3K5 | OASL:AIF1 | USP18:CHMP7 | OASL:CASP8 |
| OASL:POLD4 | OASL:CSNK1D | USP18:NECAP2 | OASL:PCF11 |
| OASL:ARAP1 | OASL:GABARAP | OASL:CAP1 | OASL:PRKCD |
| OASL:CTBP2 | OASL:HAL | OASL:HPS1 | OASL:PSTPIP1 |
| OASL:DGKA | OASL:LAPTM5 | OASL:IL1RAP | OASL:SLCO3A1 |
| OASL:NFYA | OASL:XPC | OASL:MEF2A | OASL:ZDHHC17 |
| OASL:PCNX | USP18:NFKB1 | OASL:RNF19B | USP18:FOXO1 |
| OASL:PFDN5 | OASL:ACAP2 | OASL:TMEM127 | OASL:ASAP1 |
| OASL:R3HDM2 | OASL:CLEC4A | USP18:IL27RA | OASL:BAZ2B |
| OASL:STX6 | OASL:HIP1 | OASL:CDIPT | OASL:FAM65B |
| EIF2AK2:SYPL1 | OASL:PIAS1 | OASL:CREB1 | OASL:HHEX |
| ISG15:ABLIM1 | OASL:PPP3R1 | OASL:GPS2 | OASL:MAX |
| OASL:FOXJ2 | OASL:RALB | OASL:NDE1 | OASL:PHF2 |
| OASL:IQSEC1 | OASL:RGS19 | OASL:RAB11FIP1 | OASL:RNF130 |
| OASL:LRMP | OASL:TRIOBP | USP18:ABLIM1 | OASL:SOS2 |
| OASL:NAB1 | EIF2AK2:PDE3B | EIF2AK2:TNRC6B | OASL:STAM2 |
| OASL:RAB31 | OASL:NCOA4 | OASL:FAM134A | OASL:ZFC3H1 |
| OASL:WASF2 | OASL:RARA | OASL:FCGRT | IFI44:CYLD |
| OASL:ZNF274 | OASL:RPS6KA3 | OASL:LPIN2 | IFIH1:CRLF3 |
| OAS2:LEF1 | OASL:SIRPA | OASL:PECAM1 | OASL:BANP |
| OASL:BRD1 | OASL:TLE3 | OASL:WBP2 | OASL:CCND3 |
| OASL:GNAQ | OASL:TNFRSF1A | OASL:ZNF148 | OASL:DGCR2 |
| OASL:GSK3B | DDX60:TGFBR2 | OASL:RTN3 | OASL:USP15 |
| OASL:IL6R | OASL:FLOT2 | OASL:TYK2 | USP18:EIF3H |
| OASL:MAPK14 | OASL:FNBP1 | USP18:LTB | OASL:LAT2 |
| USP18:TGFBR2 | OASL:MAP3K3 | DHX58:IL16 | OASL:ZYX |
| ISG15:LTB | OASL:STX10 | ISG15:IL4R | USP18:CAMK1D |
| OASL:INPP5D | OASL:ZDHHC18 | OASL:BRD4 | ZBP1:NDE1 |
| OASL:MED13 | OASL:ZNF143 | OASL:CCNT2 | |
| OASL:MORC3 | TAP1:TGFBR2 | OASL:FGR | |
| OASL:PTAFR | OAS2:ABLIM1 | OASL:ITSN2 | |
| OASL:RBM23 | OASL:ARRB2 | OASL:LYL1 | |
| OASL:SNN | OASL:IKBKB | OASL:PHF3 | |

26. The method of any one of claims 1 to 25, wherein a single VaSIRS derived biomarker combination (e.g., any one from TABLE B) is used for determining the indicator.

27. The method of any one of claims 1 to 25, wherein two VaSIRS derived biomarker combinations (e.g., any two from TABLE B) are used for determining the indicator.

28. The method of any one of claims 1 to 25, wherein three VaSIRS derived biomarker combinations (e.g., any three from TABLE B) are used for determining the indicator.

29. The method of any one of claims 1 to 25, wherein four VaSIRS derived biomarker combinations (e.g., any four from TABLE B) are used for determining the indicator.

30. The method of claim 26, comprising: (a) determining a single VaSIRS derived biomarker value using a pair of VaSIRS biomarker values, the single VaSIRS derived biomarker value being indicative of a ratio of levels of first and second VaSIRS biomarkers; and (b) determining the indicator using the single derived VaSIRS biomarker value.

31. The method of claim 27, comprising: (a) determining a first VaSIRS derived biomarker value using a first pair of VaSIRS biomarker values, the first VaSIRS derived biomarker value being indicative of a ratio of levels of first and second VaSIRS biomarkers; (b) determining a second VaSIRS derived biomarker value using a second pair of VaSIRS biomarker values, the second VaSIRS derived biomarker value being indicative of a ratio of levels of third and fourth VaSIRS biomarkers; and (c) determining the indicator by combining the first and second derived VaSIRS biomarker values, using for example a combining function as disclosed herein.

32. The method of claim 28, comprising: (a) determining a first VaSIRS derived biomarker value using a first pair of VaSIRS biomarker values, the first VaSIRS derived biomarker value being indicative of a ratio of levels of first and second VaSIRS biomarkers; (b) determining a second VaSIRS derived biomarker value using a second pair of VaSIRS biomarker values, the second VaSIRS derived biomarker value being indicative of a ratio of levels of third and fourth VaSIRS biomarkers; (c) determining a third VaSIRS derived biomarker value using a third pair of VaSIRS biomarker values, the third VaSIRS derived biomarker value being indicative of a ratio of levels of fifth and fourth VaSIRS biomarkers; and (d) determining the indicator by combining the first and sixth derived VaSIRS biomarker values, using for example a combining function as disclosed herein.

33. The method of any one of claims 1 to 32, wherein individual VaSIRS derived biomarker combinations are selected from ISG15:IL16, OASL:ADGRE5, TAP1:TGFBR2, IFIH1:CRLF3, IFI44:IL4R, EIF2AK2:SYPL1, OAS2:LEF1, STAT1:PCBP2 and IFI6:IL6ST.

34. The method of any one of claims 1 to 32, wherein individual VaSIRS derived biomarker combinations are selected from ISG15:IL16 and OASL:ADGRE5.

35. The method of any one of claims 1 to 34, wherein the virus associated with the VaSIRS is suitably selected from any one of Baltimore virus classification Groups I, II, III, IV, V, VI and VII, which is capable of inducing at least one of the clinical signs of SIRS.

36. The method of any one of claims 5 to 9 and 11 to 35, wherein individual PaSIRS derived biomarker combinations are selected from TABLE C.
TABLE C
PaSIRS Derived Biomarker

| | | | |
|---|---|---|---|
| RPL9:WARS | SUCLG2:CEBPB | TTC17:ATOX1 | NOSIP:WARS |
| RPL9:CSTB | EXOSC10:G6PD | CSNK1G2:G6PD | RPS4X:UPP1 |
| NUP160:WARS | CEP192:WARS | SETX:CEBPB | CNOT7:CEBPB |
| IMP3:ATOX1 | NUP160:CD63 | ARHGAP17:CEBPB | ARHGAP17:WARS |
| RPS4X:WARS | TMEM50B:WARS | ZMYND11:WARS | UFM1:WARS |
| TCF4:CEBPB | EXOSC10:LDHA | IMP3:UPP1 | PREPL:SQRDL |
| IMP3:LAP3 | ARID1A:CSTB | EXOSC10:IRF1 | IMP3:TAP1 |
| EXOSC10:WARS | SUCLG2:WARS | UFM1:CEBPB | ARID1A:PCMT1 |
| TTC17:WARS | ARID1A:CEBPB | ARID1A:LDHA | SUCLG2:SQRDL |
| TCF4:WARS | FBXO11:TANK | RPL9:ATOX1 | RPL22:SH3GLB1 |
| METAP1:WARS | SUCLG2:SH3GLB1 | TTC17:GNG5 | BCL11A:WARS |
| FNTA:POMP | TTC17:G6PD | EXOSC10:POMP | CNOT7:WARS |
| TCF4:TANK | IMP3:PCMT1 | ARID1A:ATOX1 | ZBED5:TCIRG1 |
| TOP2B:CEBPB | ARID1A:LAP3 | RPL9:SH3GLB1 | EXOSC10:SQRDL |
| AHCTF1:CEBPB | IMP3:SQRDL | LY9:CEBPB | AHCTF1:GNG5 |
| RPS4X:MYD88 | TCF4:ATOX1 | RPS14:WARS | ZMYND11:FCER1G |
| IMP3:CEBPB | IMP3:SH3GLB1 | FNTA:SQRDL | TOP2B:ENO1 |
| RPL9:CEBPB | EXOSC10:MYD88 | APEX1:CD63 | IMP3:IRF1 |
| RPS4X:CEBPB | LY9:WARS | SETX:WARS | CEP192:TAP1 |
| TTC17:CEBPB | IMP3:CSTB | IMP3:TNIP1 | RPL9:MYD88 |
| PREPL:WARS | RPL15:CEBPB | FNTA:CD63 | RPL22:GNG5 |
| TCF4:LAP3 | ARHGAP17:ATOX1 | TTC17:TCIRG1 | FNTA:MYD88 |
| ZBED5:WARS | TTC17:MYD88 | EXOSC10:SH3GLB1 | TCF4:GNG5 |
| TCF4:POMP | EXOSC10:TCIRG1 | RPS4X:FCER1G | EXOSC10:TANK |
| NUP160:SQRDL | ZMYND11:CEBPB | RPS4X:PGD | MLLT10:WARS |
| TRIT1:WARS | CEP192:TANK | CAMK2G:CEBPB | TTC17:POMP |
| ZBED5:CEBPB | IMP3:UBE2L6 | ZMYND11:G6PD | TCF4:MYD88 |
| IMP3:WARS | RPS4X:CD63 | FNTA:CEBPB | IMP3:MYD88 |
| RPS4X:SQRDL | RPL9:CD63 | ZMYND11:CD63 | TOP2B:CD63 |
| NUP160:POMP | ARID1A:UBE2L6 | TCF4:RALB | CEP192:RALB |
| EXOSC10:LAP3 | TCF4:UBE2L6 | ARHGAP17:LAP3 | NUP160:PGD |
| RPS4X:GNG5 | ARID1A:WARS | IMP3:CD63 | RPL9:SQRDL |
| TOP2B:WARS | CAMK2G:G6PD | ZMYND11:C3AR1 | CEP192:PCMT1 |
| RPL9:POMP | RPS4X:SH3GLB1 | AHCTF1:WARS | TCF4:SQRDL |
| EXOSC10:ATOX1 | RPL9:TANK | RPS4X:ENO1 | RPL9:GNG5 |
| TTC17:TANK | IMP3:TANK | CEP192:PLSCR1 | EXOSC10:CD63 |
| EXOSC10:CEBPB | ZBED5:SH3GLB1 | EXOSC9:POMP | TCF4:SH3GLB1 |
| NOSIP:CEBPB | TMEM50B:CEBPB | FNTA:GNG5 | ADSL:WARS |
| RPL22:CEBPB | RPS4X:POMP | CEP192:IRF1 | TTC17:SH3GLB1 |
| TTC17:ATP2A2 | TOP2B:POMP | CEP192:CEBPB | ARID1A:SQRDL |
| SEH1L:WARS | METAP1:POMP | ZMYND11:CSTB | ARID1A:G6PD |
| EXOSC10:UBE2L6 | EXOSC10:CSTB | FNTA:SH3GLB1 | AHCTF1:TANK |
| TTC17:LAP3 | ZNF266:CEBPB | ARID1A:TAP1 | EXOSC2:CEBPB |
| RPS4X:SERPINB1 | IMP3:G6PD | TTC17:TIMP2 | NOSIP:TCIRG1 |
| FBXO11:RALB | CEP192:POMP | TTC17:SQRDL | RPL9:FCER1G |
| TMEM50B:SQRDL | TMEM50B:CD63 | ARID1A:CD63 | ARID1A:TRPC4AP |
| CSNK1G2:CEBPB | ZMYND11:ENO1 | FNTA:LAP3 | ARID1A:SH3GLB1 |
| RPL15:SH3GLB1 | CEP192:LAP3 | BCL11A:LAP3 | CEP192:RAB27A |
| BCL11A:G6PD | RPL9:UPP1 | IMP3:FCER1G | EXOSC10:FCER1G |
| ZBED5:SQRDL | TCF4:SERPINB1 | CEP192:TNIP1 | SETX:SQRDL |
| ARID1A:SERPINB1 | AHCTF1:PLAUR | ZMYND11:SQRDL | CEP192:MYD88 |
| RPS14:SH3GLB1 | RPL22:WARS | ZMYND11:GNG5 | ARID1A:BCL6 |
| EXOSC10:TAP1 | EXOSC2:POMP | ARID1A:SLAMF7 | EXOSC2:CD63 |
| BCL11A:CEBPB | ZMYND11:SH3GLB1 | ARID1A:TCIRG1 | AHCTF1:UPP1 |
| ADSL:ATOX1 | RPS14:CD63 | ARID1A:TNIP1 | IMP3:RALB |
| TCF4:FCER1G | CAMK2G:SQRDL | ZMYND11:PGD | ADK:SH3GLB1 |
| LY9:SH3GLB1 | ARIH2:CEBPB | CSNK1G2:TCIRG1 | SUCLG2:CD63 |
| IMP3:GNG5 | ARID1A:NFIL3 | TTC17:CD63 | FNTA:WARS |
| SERTAD2:CEBPB | IMP3:POMP | NUP160:RTN4 | EXOSC10:TUBA1B |
| AHCTF1:MYD88 | EXOSC10:ENO1 | RPL15:SQRDL | IMP3:PCBP1 |
| ARID1A:ENO1 | PREPL:SH3GLB1 | TTC17:UPP1 | ARID1A:GRINA |
| EXOSC10:UPP1 | TTC17:BCL6 | CAMK2G:FCER1G | TTC17:PGD |
| CEP192:CSTB | ZMYND11:POMP | CEP192:TCIRG1 | ARID1A:TANK |
| LY9:SQRDL | IMP3:RIT1 | IRF8:CEBPB | CSNK1G2:FLII |
| LY9:TNIP1 | CAMK2G:CD63 | CEP192:G6PD | CEP192:STAT3 |
| CNOT7:G6PD | IL10RA:CEBPB | FBXO11:UPP1 | AHCTF1:SH3GLB1 |
| ARID1A:PLSCR1 | FNTA:TCIRG1 | ARIH2:TCIRG1 | TTC17:SERPINB1 |
| CEP192:ATOX1 | CAMK2G:TCIRG1 | PCID2:WARS | EXOSC2:UPP1 |
| IMP3:ENO1 | EXOSC10:PCMT1 | CAMK2G:PGD | IMP3:TSPO |
| ARID1A:IRF1 | RPS14:SQRDL | EXOSC10:FLII | BCL11A:TNIP1 |
| EXOSC10:GNG5 | IMP3:PGD | RPL15:CD63 | ADSL:ENO1 |
| LY9:ATOX1 | ZBED5:TNIP1 | RPL22:CD63 | NOSIP:SQRDL |
| FBXO11:CEBPB | CHN2:WARS | CNOT7:SQRDL | SERBP1:SH3GLB1 |
| RPL9:SLAMF7 | IMP3:TCIRG1 | FBXO11:SQRDL | ARID1A:NFKBIA |
| RPL9:TNIP1 | AHCTF1:SQRDL | TCF4:UPP1 | RPL9:ENO1 |
| PREPL:CD63 | CLIP4:WARS | PCID2:CEBPB | ARID1A:RAB27A |
| ARHGAP17:SQRDL | NOSIP:POMP | CNOT7:CSTB | RPL15:WARS |
| ZBED5:POMP | RPL22:SQRDL | ARID1A:PGD | BCL11A:CSTB |
| RPS4X:TSPO | IMP3:VAMP3 | ARID1A:STAT3 | |

37. The method of any one of claims 5 to 9 and 11 to 36, wherein a single PaSIRS derived biomarker combination (e.g., any one from TABLE C) is used for determining the indicator.

38. The method of any one of claims 5 to 9 and 11 to 36, wherein two PaSIRS derived biomarker combinations (e.g., any two from TABLE C) are used for determining the indicator.

39. The method of any one of claims 5 to 9 and 11 to 36, wherein three PaSIRS derived biomarker combinations (e.g., any three from TABLE C) are used for determining the indicator.

40. The method of any one of claims 5 to 9 and 11 to 36, wherein four PaSIRS derived biomarker combinations (e.g., any four from TABLE C) are used for determining the indicator.

41. The method of claim 37, comprising: (a) determining a single PaSIRS derived biomarker value using a pair of PaSIRS biomarker values, the single PaSIRS derived biomarker value being indicative of a ratio of levels of first and second PaSIRS biomarkers; and (b) determining the indicator using the single derived PaSIRS biomarker value.

42. The method of claim 38, comprising: (a) determining a first PaSIRS derived biomarker value using a first pair of PaSIRS biomarker values, the first PaSIRS derived biomarker value being indicative of a ratio of levels of first and second PaSIRS biomarkers; (b) determining a second PaSIRS derived biomarker value using a second pair of PaSIRS biomarker values, the second PaSIRS derived biomarker value being indicative of a ratio of levels of third and fourth PaSIRS biomarkers; and (c) determining the indicator by combining the first and second derived PaSIRS biomarker values, using for example a combining function as disclosed herein.

43. The method of claim 39, comprising: (a) determining a first PaSIRS derived biomarker value using a first pair of PaSIRS biomarker values, the first PaSIRS derived biomarker value being indicative of a ratio of levels of first and second PaSIRS biomarkers; (b) determining a second PaSIRS derived biomarker value using a second pair of PaSIRS biomarker values, the second PaSIRS derived biomarker value being indicative of a ratio of levels of third and fourth PaSIRS biomarkers; (c) determining a third PaSIRS derived biomarker value using a third pair of PaSIRS biomarker values, the third PaSIRS derived biomarker value being indicative of a ratio of levels of fifth and fourth PaSIRS biomarkers; and (d) determining the indicator by combining the first and sixth derived PaSIRS biomarker values, using for example a combining function as disclosed herein.

44. The method of any one of claims 5 to 9 and 11 to 43, wherein individual PaSIRS derived biomarker combinations are suitably selected from TTC17:G6PD, HERC6:LAP3 and NUP160:TPP1.

45. The method of any one of claims 5 to 9 and 11 to 43, wherein the protozoan associated with the PaSIRS is selected from any of the following protozoal genera, which are capable of inducing at least one of the clinical signs of SIRS; for example, Toxoplasma, Babesia, Plasmodium, Trypanosoma, Giardia, Entamoeba, Cryptosporidium, Balantidium and Leishmania.

46. The method of any one of claims 9 to 45, wherein individual InSIRS derived biomarker combinations are selected from TABLE D.
TABLE D
InSIRS Derived Biomarker

| | | | |
|---|---|---|---|
| TNFSF8:VEZT | TNFSF8:NIP7 | TNFSF8:LRRC8D | ENTPD1:ARL6IP5 |
| TNFSF8:HEATR1 | TNFSF8:MLLT10 | TNFSF8:RNMT | TNFSF8:CD84 |
| TNFSF8:THOC2 | TNFSF8:EIF5B | STK17B:ARL6IP5 | TNFSF8:PWP1 |
| TNFSF8:IPO7 | TNFSF8:ANK3 | TNFSF8:IQCB1 | TNFSF8:SLC35D1 |
| ADAM19:EXOC7 | TNFSF8:SMC3 | TNFSF8:FASTKD2 | SYNE2:RBM26 |
| TNFSF8:ARHGAP5 | TNFSF8:REPS1 | TNFSF8:RDX | TNFSF8:CD40LG |
| TNFSF8:RMND1 | TNFSF8:C14orf1 | TNFSF8:MTO1 | VNN3:CYSLTR1 |
| TNFSF8:IDE | TNFSF8:FUT8 | IQSEC1:MACF1 | TNFSF8:SYT11 |
| TNFSF8:TBCE | TNFSF8:VPS13A | TNFSF8:SMC6 | TNFSF8:RIOK2 |
| TNFSF8:G3BP1 | TNFSF8:RAD50 | TNFSF8:NEK1 | TNFSF8:BZW2 |
| TNFSF8:CDK6 | TNFSF8:ESF1 | TNFSF8:ZNF562 | TNFSF8:LARP1 |
| TNFSF8:MANEA | TNFSF8:MRPS10 | TNFSF8:PEX1 | ADAM19:SYT11 |
| TNFSF8:CKAP2 | CDA:EFHD2 | ADAM19:SIDT2 | TNFSF8:NCBP1 |
| TNFSF8:ZNF507 | TNFSF8:SLC35A3 | TNFSF8:METTL5 | ADAM19:MACF1 |
| TNFSF8:GGPS1 | ADAM19:TMEM87A | CYP4F3:TRAPPC2 | TNFSF8:NOL8 |
| TNFSF8:XPO4 | TNFSF8:LANCL1 | TNFSF8:KRIT1 | TNFSF8:KIAA0391 |
| TNFSF8:PHC3 | ADAM19:ERCC4 | TNFSF8:YEATS4 | |
| TNFSF8:ASCC3 | TNFSF8:CD28 | TNFSF8:CLUAP1 | |
| TNFSF8:NOL10 | ADAM19:MLLT10 | TNFSF8:LARP4 | |

47. The method of any one of claims 9 to 46, wherein a single InSIRS derived biomarker combination (e.g., any one from TABLE D) is used for determining the indicator.

48. The method of any one of claims 9 to 46, wherein two InSIRS derived biomarker combinations (e.g., any two from TABLE D) are used for determining the indicator.

49. The method of any one of claims 9 to 46, wherein three InSIRS derived biomarker combinations (e.g., any three from TABLE D) are used for determining the indicator.

50. The method of any one of claims 9 to 46, wherein four InSIRS derived biomarker combinations (e.g., any four from TABLE D) are used for determining the indicator.

51. The method of claim 47, comprising: (a) determining a single InSIRS derived biomarker value using a pair of InSIRS biomarker values, the single InSIRS derived biomarker value being indicative of a ratio of levels of first and second InSIRS biomarkers; and (b) determining the indicator using the single derived InSIRS biomarker value.

52. The method of claim 48, comprising: (a) determining a first InSIRS derived biomarker value using a first pair of InSIRS biomarker values, the first InSIRS derived biomarker value being indicative of a ratio of levels of first and second InSIRS biomarkers; (b) determining a second InSIRS derived biomarker value using a second pair of InSIRS biomarker values, the second InSIRS derived biomarker value being indicative of a ratio of levels of third and fourth InSIRS biomarkers; and (c) determining the indicator by combining the first and second derived InSIRS biomarker values, using for example a combining function as disclosed herein.

53. The method of claim 49, comprising: (a) determining a first InSIRS derived biomarker value using a first pair of InSIRS biomarker values, the first InSIRS derived biomarker value being indicative of a ratio of levels of first and second InSIRS biomarkers; (b) determining a second InSIRS derived biomarker value using a second pair of InSIRS biomarker values, the second InSIRS derived biomarker value being indicative of a ratio of levels of third and fourth InSIRS biomarkers; (c) determining a third InSIRS derived biomarker value using a third pair of InSIRS biomarker values, the third InSIRS derived biomarker value being indicative of a ratio of levels of fifth and fourth InSIRS biomarkers; and (d) determining the indicator by combining the first and sixth derived InSIRS biomarker values, using for example a combining function as disclosed herein.

54. The method of any one of claims 9 to 54, wherein individual InSIRS derived biomarker combinations are suitably selected from ENTPD1:ARL6IP5, TNFSF8:HEATR1, ADAM19:POLR2A, SYNE2:VPS13C, TNFSF8:NIP7, CDA:EFHD2, ADAM19:MLLT10, PTGS1:ENTPD1, ADAM19:EXOC7 and CDA:PTGS1.

55. The method of any one of claims 9 to 54, wherein individual InSIRS derived biomarker combinations are suitably selected from ENTPD1:ARL6IP5 and TNFSF8:HEATR1.

56. An apparatus for determining an indicator used in assessing a likelihood of a subject having a presence, absence or degree of BaSIRS or VaSIRS. This apparatus generally comprises at least one electronic processing device that:
determines a plurality of host response specific biomarker values including a plurality of BaSIRS biomarker values and a plurality of VaSIRS biomarker values, the plurality of BaSIRS biomarker values being indicative of values measured for a corresponding plurality of BaSIRS biomarkers in a sample taken from the subject, the plurality of VaSIRS biomarker values being indicative of values measured for a corresponding plurality of VaSIRS biomarkers in the sample;
determines a plurality of host response specific derived biomarker values including at least one BaSIRS derived biomarker value and at least one VaSIRS derived biomarker value, each derived BaSIRS biomarker value being determined using at least a subset of the plurality of BaSIRS biomarker values, and being indicative of a ratio of levels of a corresponding at least a subset of the plurality of BaSIRS biomarkers, and each derived VaSIRS biomarker value being determined using at least a subset of the plurality of VaSIRS biomarker values, and being indicative of a ratio of levels of a corresponding at least a subset of the plurality of VaSIRS biomarkers; and
determines the indicator using the plurality of host response specific derived biomarker values, wherein the at least a subset of BaSIRS biomarkers forms a BaSIRS derived biomarker combination which is not a derived biomarker combination for VaSIRS, PaSIRS or InSIRS, and wherein the at least a subset of VaSIRS biomarkers forms a VaSIRS derived biomarker combination which is not a derived biomarker combination for BaSIRS, PaSIRS or InSIRS.

57. The apparatus of claim 56, wherein the at least one processing device:
(a) determines a plurality of pathogen specific biomarker values including at least one bacterial biomarker value and at least one viral biomarker value, the least one bacterial biomarker value being indicative of a value measured for a corresponding bacterial biomarker in the sample, the least one viral biomarker value being indicative of a value measured for a corresponding viral biomarker in the sample; and
(b) determines the indicator using the host response specific derived biomarker values in combination with the pathogen specific biomarker values.

58. The apparatus of claim 56 or claim 57, wherein the plurality of host response specific biomarker values determined by the least one electronic processing device further include a plurality of PaSIRS biomarker values, the plurality of PaSIRS biomarker values being indicative of values measured for a corresponding plurality of PaSIRS biomarkers in the sample, and the plurality of host response specific derived biomarker values further includes at least one PaSIRS derived biomarker value, and the least one electronic processing device further:
determines each PaSIRS derived biomarker value using at least a subset of the plurality of PaSIRS biomarker values, the PaSIRS derived biomarker value being indicative of a ratio of levels of a corresponding at least a subset of the plurality of PaSIRS biomarkers; and
determines the indicator using the plurality of host response specific derived biomarker values, wherein the at least a subset of PaSIRS biomarkers forms a PaSIRS derived biomarker combination which is not a derived biomarker combination for BaSIRS, VaSIRS or InSIRS.

59. The apparatus of any one of claims 56 to 58, wherein the least one electronic processing device:
(a) determines a plurality of pathogen specific biomarker values including at least one bacterial biomarker value, at least one viral biomarker value and at least one protozoal biomarker value, the at least one bacterial biomarker value being indicative of a value measured for a corresponding bacterial biomarker in the sample, the least one viral biomarker value being indicative of a value measured for a corresponding viral biomarker in the sample, and the least one protozoal biomarker value being indicative of a value measured for a corresponding protozoal biomarker in the sample; and
(b) determines the indicator using the host response specific derived biomarker values in combination with the pathogen specific biomarker values.

60. The apparatus of any one of claims 56 to 59, wherein the plurality of host response specific biomarker values determined by the least one electronic processing device further include a plurality of InSIRS biomarker values, the plurality of InSIRS biomarker values being indicative of values measured for a corresponding plurality of InSIRS biomarkers in the sample, and the plurality of host response specific derived biomarker values further includes at least one InSIRS derived biomarker value, and the least one electronic processing device further:
determines each InSIRS derived biomarker value using at least a subset of the plurality of InSIRS biomarker values, the InSIRS derived biomarker value being indicative of a ratio of levels of a corresponding at least a subset of the plurality of InSIRS biomarkers; and
determines the indicator using the plurality of host response specific derived biomarker values, wherein the at least a subset of InSIRS biomarkers forms a InSIRS derived biomarker combination which is not a derived biomarker combination for BaSIRS, VaSIRS or PaSIRS.

61. A composition for determining an indicator used in assessing a likelihood of a subject having a presence, absence or degree of BaSIRS or VaSIRS, the composition comprising: (1) a pair of BaSIRS biomarker cDNAs, and for each BaSIRS biomarker cDNA at least one oligonucleotide primer that hybridizes to the BaSIRS biomarker cDNA, and/or at least one oligonucleotide probe that hybridizes to the BaSIRS biomarker cDNA, wherein the at least one oligonucleotide primer and/or the at least one oligonucleotide probe comprises a heterologous label, and (2) a pair of VaSIRS biomarker cDNAs, and for each VaSIRS biomarker cDNA at least one oligonucleotide primer that hybridizes to the VaSIRS biomarker cDNA, and/or at least one oligonucleotide probe that hybridizes to the VaSIRS biomarker cDNA, wherein the at least one oligonucleotide primer and/or the at least one oligonucleotide probe comprises a heterologous label, wherein the pair of BaSIRS biomarker cDNAs forms a BaSIRS derived biomarker combination which is not a derived biomarker combination for VaSIRS, PaSIRS or InSIRS, wherein the pair of VaSIRS biomarker cDNAs forms a VaSIRS derived biomarker combination which is not a derived biomarker combination for BaSIRS, PaSIRS or InSIRS, wherein the BaSIRS derived biomarker combination is selected from the BaSIRS derived biomarker combinations set out in TABLE A, and wherein the VaSIRS derived biomarker combination is selected from the VaSIRS derived biomarker combinations set out in TABLE B.

62. The composition of claim 61, further comprising: (a) a pair of PaSIRS biomarker cDNAs, and for each PaSIRS biomarker cDNA at least one oligonucleotide primer that hybridizes to the PaSIRS biomarker cDNA, and/or at least one oligonucleotide probe that hybridizes to the PaSIRS biomarker cDNA, wherein the at least one oligonucleotide primer and/or the at least one oligonucleotide probe comprises a heterologous label, wherein the pair of PaSIRS biomarker cDNAs forms a PaSIRS derived biomarker combination which is not a derived biomarker combination for BaSIRS, VaSIRS or InSIRS, and wherein the PaSIRS derived biomarker combination is selected from the PaSIRS derived biomarker combinations set out in TABLE C.

63. The composition of claim 61 or claim 62, further comprising: (b) a pair of InSIRS biomarker cDNAs, and for each InSIRS biomarker cDNA at least one oligonucleotide primer that hybridizes to the InSIRS biomarker cDNA, and/or at least one oligonucleotide probe that hybridizes to the InSIRS biomarker cDNA, wherein the at least one oligonucleotide primer and/or the at least one oligonucleotide probe comprises a heterologous label, wherein the pair of InSIRS biomarker cDNAs forms an InSIRS derived biomarker combination which is not a derived biomarker combination for BaSIRS, VaSIRS or PaSIRS, and wherein the InSIRS derived biomarker combination is selected from the InSIRS derived biomarker combinations set out in TABLE D.

64. The composition of any one of claims 61 to 63, further comprising a DNA polymerase.

65. The composition of claim 64, wherein the DNA polymerase is a thermostable DNA polymerase.

66. The composition of any one of claims 61 to 65, comprising for each cDNA a pair of forward and reverse oligonucleotide primers that permit nucleic acid amplification of at least a portion of the cDNA to produce an amplicon.

67. The composition of claim 66, further comprising for each cDNA an oligonucleotide probe that comprises a heterologous label and hybridizes to the amplicon.

68. The composition of any one of claims 61 to 67, wherein the components of an individual composition are comprised in a mixture.

69. The composition of any one of claims 61 to 68, comprising a population of cDNAs corresponding to mRNA derived from a cell or cell population from a patient sample.

70. The composition of claim 69, wherein the population of cDNAs represents whole leukocyte cDNA (e.g., whole peripheral blood leukocyte cDNA) with a cDNA expression profile characteristic of a subject with a SIRS condition selected from BaSIRS, VaSIRS, PaSIRS and InSIRS, wherein the cDNA expression profile comprises at least one pair of biomarkers (e.g., 1, 2, 3, 4, 5, 6, 7, 8, 9, 10, 11, 12, 13, 14, 15, 16, 17, 18, 19, 20, 30, 40, 50 or more pairs of biomarkers), wherein a respective pair of biomarkers comprises a first biomarker and a second biomarker, wherein the first biomarker is expressed at a higher level in leukocytes (e.g., whole peripheral blood leukocytes) from a subject with the SIRS condition than in leukocytes (e.g., whole peripheral blood leukocytes) from a healthy subject or from a subject without the SIRS condition (e.g., the first biomarker is expressed in leukocytes from a subject with the SIRS condition at a level that is at least 110%, 120%, 130%, 140%, 150%, 160%, 170%, 180%, 190%, 200%, 250%, 300%, 350%, 400%, 450%, 500%, 600%, 700%, 800%, 900%, 1000%, 2000%, 3000%, 4000%, or 5000% of the level of the first biomarker in leukocytes from a healthy subject or from a subject without the SIRS condition), wherein the second biomarker is expressed at about the same or at a lower level in leukocytes (e.g., whole peripheral blood leukocytes) from a subject with the SIRS condition than in leukocytes (e.g., whole peripheral blood leukocytes) from a healthy subject or from a subject without the SIRS condition (e.g., the second biomarker is expressed in leukocytes from a subject with the SIRS condition at a level that is no more than 105%, 104%, 103%, 102%, 100%, 99%, 98%, 97%, 96%, 95%, 90%, 85%, 80%, 75%, 70%, 65%, 60%, 55%, 50%, 45%, 40%, 35%, 30%, 25%, 20%, 15%, 10%, 5%, 1%, 0.5%, 0.1%, 0.05%, 0.01%, 0.005%, 0.001% of the level of the second biomarker in leukocytes from a healthy subject or from a subject without the SIRS condition) and wherein the first biomarker is a first mentioned or ‘numerator’ biomarker of a respective pair of biomarkers in any one of TABLES A, B, C or D, and the second biomarker represents a second mentioned or ‘denominator’ biomarker of the respective pair of biomarkers.

71. The composition of claim 69, wherein the sample is a body fluid, including blood, urine, plasma, serum, urine, secretion or excretion.

72. The composition of claim 69, wherein the cell population is from blood, suitably peripheral blood.

73. The composition of claim 69, wherein the sample comprises blood, suitably peripheral blood.

74. The composition of any one of claims 69 to 73, wherein the cell or cell population is a cell or cell population of the immune system, suitably a leukocyte or leukocyte population.

75. The composition of any one of claims 61 to 74, further comprising a pathogen nucleic acid and at least one oligonucleotide primer that hybridizes to the pathogen nucleic acid, and/or at least one oligonucleotide probe that hybridizes to the pathogen nucleic acid, wherein the at least one oligonucleotide primer and/or the at least one oligonucleotide probe comprises a heterologous label.

76. The composition of claim 75, wherein the pathogen from which the pathogen nucleic acid is selected is from a bacterium, a virus and a protozoan.

77. The composition of claim 76, wherein the pathogen nucleic acid is derived from a patient sample, suitably a body fluid.

78. The composition of claim 77, wherein the body fluid is selected from blood, urine, plasma, serum, urine, secretion and excretion.

79. The composition of claim 77, wherein the sample comprises blood, suitably peripheral blood.

80. A kit for determining an indicator used in assessing a likelihood of a subject having a presence, absence or degree of BaSIRS or VaSIRS, the kit comprising: (1) for each of a pair of BaSIRS biomarker cDNAs at least one oligonucleotide primer and/or at least one oligonucleotide probe that hybridizes to the BaSIRS biomarker cDNA, wherein the at least one oligonucleotide primer and/or the at least one oligonucleotide probe comprises a heterologous label; and (2) for each of a pair of VaSIRS biomarker cDNA at least one oligonucleotide primer and/or at least one oligonucleotide probe that hybridizes to the VaSIRS biomarker cDNA, wherein the at least one oligonucleotide primer and/or the at least one oligonucleotide probe comprise(s) a heterologous label, wherein the pair of BaSIRS biomarker cDNAs forms a BaSIRS derived biomarker combination which is not a derived biomarker combination for VaSIRS, PaSIRS or InSIRS, wherein the pair of VaSIRS biomarker cDNAs forms a VaSIRS derived biomarker combination which is not a derived biomarker combination for BaSIRS, PaSIRS or InSIRS, wherein the BaSIRS derived biomarker combination is selected from the BaSIRS derived biomarker combinations set out in TABLE A, and wherein the VaSIRS derived biomarker combination is selected from the VaSIRS derived biomarker combinations set out in TABLE B.

81. The kit of claim 80, further comprising: (a) for each of a pair of PaSIRS biomarker cDNAs at least one oligonucleotide primer and/or at least one oligonucleotide probe that hybridizes to the PaSIRS biomarker cDNA, wherein the at least one oligonucleotide primer and/or the at least one oligonucleotide probe comprises a heterologous label, wherein the at least one oligonucleotide primer and/or the at least one oligonucleotide probe comprises a heterologous label, wherein the pair of PaSIRS biomarker cDNAs forms a PaSIRS derived biomarker combination which is not a derived biomarker combination for BaSIRS, VaSIRS or InSIRS, and wherein the PaSIRS derived biomarker combination is selected from the PaSIRS derived biomarker combinations set out in TABLE C.

82. The kit of claim 80 or claim 81, further comprising: (b) for each of a pair of InSIRS biomarker cDNAs at least one oligonucleotide primer and/or at least one oligonucleotide probe that hybridizes to the InSIRS biomarker cDNA, wherein the at least one oligonucleotide primer and/or the at least one oligonucleotide probe comprises a heterologous label, wherein the pair of InSIRS biomarker cDNAs forms an InSIRS derived biomarker combination which is not a derived biomarker combination for BaSIRS, VaSIRS or PaSIRS, and wherein the InSIRS derived biomarker combination is selected from the InSIRS derived biomarker combinations set out in TABLE D.

83. The kit of any one of claims 80 to 82, further comprising: at least one oligonucleotide primer that hybridizes to a pathogen nucleic acid, and/or at least one oligonucleotide probe that hybridizes to the pathogen nucleic acid, wherein the at least one oligonucleotide primer and/or the at least one oligonucleotide probe comprises a heterologous label.

84. The kit of any one of claims 80 to 83, further comprising: a DNA polymerase.

85. The kit of claim 84, wherein the DNA polymerase is a thermostable DNA polymerase.

86. The kit of any one of claims 80 to 85, further comprising: for each cDNA a pair of forward and reverse oligonucleotide primers that permit nucleic acid amplification of at least a portion of the cDNA to produce an amplicon.

87. The kit of any one of claims 80 to 86, further comprising: for each cDNA an oligonucleotide probe that comprises a heterologous label and hybridizes to the amplicon.

88. The kit of any one of claims 80 to 87, wherein the components of the kit when used to determine the indicator are combined to form a mixture.

89. The kit of any one of claims 80 to 88, further comprising: one or more reagents for preparing mRNA from a cell or cell population from a patient sample (e.g., a body fluid such as blood, urine, plasma, serum, urine, secretion or excretion).

90. The kit of any one of claims 80 to 89, further comprising: a reagent for preparing cDNA from the mRNA.

91. A method for treating a subject with a SIRS condition selected from BaSIRS and VaSIRS and optionally one of PaSIRS or InSIRS, ther method comprising: exposing the subject to a treatment regimen for treating the SIRS condition based on an indicator obtained from an indicator-determining method, wherein the indicator is indicative of the presence, absence or degree of the SIRS condition in the subject, and wherein the indicator-determining method is as defined in any one of claims 1 to 55.

92. The method of claim 91, further comprising: taking a sample from the subject and determining an indicator indicative of the likelihood of the presence, absence or degree of the SIRS condition using the indicator-determining method.

93. The method of claim 91 or claim 92, further comprising: sending a sample taken from the subject to a laboratory at which the indicator is determined according to the indicator-determining method.

94. The method of claim 93, further comprising: receiving the indicator from the laboratory.

95. A method for managing a subject with a specific SIRS condition selected from BaSIRS and VaSIRS and optionally one of PaSIRS or InSIRS, ther method comprising: exposing the subject to a treatment regimen for the specific SIRS condition and avoiding exposing the subject to a treatment regimen for a SIRS condition other than the specific SIRS condition, based on an indicator obtained from an indicator-determining method, wherein the indicator is indicative of the presence, absence or degree of the SIRS condition in the subject, and wherein the indicator-determining method is an indicator-determining method as defined in any one of claims 1 to 55.

96. The method of claim 95, further comprising: taking a sample from the subject and determining an indicator indicative of the likelihood of the presence, absence or degree of the SIRS condition using the indicator-determining method.

97. The method of claim 95 or claim 96, further comprising: sending a sample taken from the subject to a laboratory at which the indicator is determined according to the indicator-determining method.

98. The method of claim 97, further comprising: receiving the indicator from the laboratory.

99. A method of monitoring the efficacy of a treatment regimen in a subject with a SIRS condition selected from BaSIRS and VaSIRS and optionally one of PaSIRS or InSIRS, wherein the treatment regimen is monitored for efficacy towards a desired health state (e.g., absence of the SIRS condition), the method comprising: (1) obtaining a biomarker profile of a sample taken from the subject after treatment of the subject with the treatment regimen, wherein the sample biomarker profile comprises (a) for each of a plurality of derived biomarkers as defined in any one of claims 1 to 55 a plurality of host response specific derived biomarker values, and optionally (b) if the SIRS condition is an infection positive SIRS condition (“IpSIRS”), a pathogen specific biomarker value as defined in claim 3 or claim 8 for a pathogen biomarker associated with the SIRS condition; and (2) comparing the sample biomarker profile to a reference biomarker profile that is correlated with a presence, absence or degree of the SIRS condition to thereby determine whether the treatment regimen is effective for changing the health status of the subject to the desired health state.

100. A method of monitoring the efficacy of a treatment regimen in a subject towards a desired health state (e.g., absence of BaSIRS, VaSIRS, PaSIRS, or InSIRS), the method comprising: (1) determining an indicator according to an indicator-determining method as broadly described above and elsewhere herein based on a sample taken from the subject after treatment of the subject with the treatment regimen; and (2) assessing the likelihood of the subject having a presence, absence or degree of a SIRS condition selected from BaSIRS and VaSIRS and optionally one of PaSIRS or InSIRS using the indicator to thereby determine whether the treatment regimen is effective for changing the health status of the subject to the desired health state.

101. The method of claim 100, wherein the indicator is determined using a plurality of host response specific derived biomarker values.

102. The method of claim 100, wherein the indicator is determined using a plurality of host response specific derived biomarker values and a plurality of pathogen specific biomarker values.

103. A method of correlating a biomarker profile with an effective treatment regimen for a SIRS condition selected from BaSIRS and VaSIRS and optionally one of PaSIRS or InSIRS, the method comprising: (1) determining a biomarker profile of a sample taken from a subject with the SIRS condition and for whom an effective treatment has been identified, wherein the biomarker profile comprises: (a) for each of a plurality of derived biomarkers as defined in any one of claims 1 to 55 a plurality of host response specific derived biomarker values, and optionally (b) if the SIRS condition is an IpSIRS, a pathogen specific biomarker value as defined in claim 3 or claim 8 for a pathogen biomarker associated with the SIRS condition; and (2) correlating the biomarker profile so determined with an effective treatment regimen for the SIRS condition.

104. A method of determining whether a treatment regimen is effective for treating a subject with a SIRS condition selected from BaSIRS and VaSIRS and optionally one of PaSIRS or InSIRS, the method comprising: (1) determining a post-treatment biomarker profile of a sample taken from the subject after treatment with a treatment regimen, wherein the biomarker profile comprises: (a) for each of a plurality of derived biomarkers as defined in any one of claims 1 to 55 a plurality of host response specific derived biomarker values, and optionally (b) if the SIRS condition is an IpSIRS, a pathogen specific biomarker value as defined in claim 3 or claim 8 for a pathogen biomarker associated with the SIRS condition; and (2) determining a post-treatment indicator using the post-treatment biomarker profile, wherein the post-treatment indicator is at least partially indicative of the presence, absence or degree of the SIRS condition, wherein the post-treatment indicator indicates whether the treatment regimen is effective for treating the SIRS condition in the subject on the basis that post-treatment indicator indicates the presence of a healthy condition or the presence of the SIRS condition of a lower degree relative to the degree of the SIRS condition in the subject before treatment with the treatment regimen.

105. A method of correlating a biomarker profile with a positive or negative response to a treatment regimen for treating a SIRS condition selected from BaSIRS and VaSIRS and optionally one of PaSIRS or InSIRS, the method comprising: (1) determining a biomarker profile of a sample taken from a subject with the SIRS condition following commencement of the treatment regimen, wherein the reference biomarker profile comprises: (a) for each of a plurality of derived biomarkers as defined in any one of claims 1 to 55 a plurality of host response specific derived biomarker values, and optionally (b) if the SIRS condition is an IpSIRS, a pathogen specific biomarker value as defined in claim 3 or claim 8 for a pathogen biomarker associated with the SIRS condition; and (2) correlating the sample biomarker profile with a positive or negative response to the treatment regimen.

106. A method of determining a positive or negative response to a treatment regimen by a subject with a SIRS condition selected from BaSIRS and VaSIRS and optionally one of PaSIRS or InSIRS, the method comprising: (1) correlating a reference biomarker profile with a positive or negative response to the treatment regimen, wherein the biomarker profile comprises: (a) for each of a plurality of derived biomarkers as defined in any one of claims 1 to 55 a plurality of host response specific derived biomarker values, and optionally (b) if the SIRS condition is an IpSIRS, a pathogen specific biomarker value as defined in claim 3 or claim 8 for a pathogen biomarker associated with the SIRS condition; (2) detecting a biomarker profile of a sample taken from the subject, wherein the sample biomarker profile comprises (i) a plurality of host response specific derived biomarker values for each of the plurality of derived biomarkers in the reference biomarker profile, and optionally (ii) a pathogen specific biomarker value for the pathogen biomarker in the reference biomarker profile, wherein the sample biomarker profile indicates whether the subject is responding positively or negatively to the treatment regimen.

107. A method of determining a positive or negative response to a treatment regimen by a subject with a SIRS condition selected from BaSIRS and VaSIRS and optionally one of PaSIRS or InSIRS, the method comprising: (1) obtaining a biomarker profile of a sample taken from the subject following commencement of the treatment regimen, wherein the biomarker profile comprises: (a) for each of a plurality of derived biomarkers as defined in any one of claims 1 to 55 a plurality of host response specific derived biomarker values, and optionally (b) if the SIRS condition is an IpSIRS, a pathogen specific biomarker value as defined in claim 3 or claim 8 for a pathogen biomarker associated with the SIRS condition, wherein the sample biomarker profile is correlated with a positive or negative response to the treatment regimen; and (2) and determining whether the subject is responding positively or negatively to the treatment regimen.

108. Use of the indicator-determining methods as defined in any one of claims 1 to 55 in methods for correlating a biomarker profile with an effective treatment regimen for a SIRS condition selected from BaSIRS and VaSIRS and optionally one of PaSIRS or InSIRS, or for determining whether a treatment regimen is effective for treating a subject with the SIRS condition, or for correlating a biomarker profile with a positive or negative response to a treatment regimen, or for determining a positive or negative response to a treatment regimen by a subject with the SIRS condition.
